United States Patent Application Publication US 2008/0300147 A1 - sequence listing, part 2

SEQ ID NO: 416 - DNA, 2597 bp, Homo sapiens
gaatgtctgcacagccgctttccacacagacatcataacaaaaaatttccaccaaaccccctccccccgcttctggccacagcacttaaacacatctctgccaaacccataaaataacaaaaccaacccgcagtggccgaccggagatagctaagatgccgcgcaggagtttccacctggatgtttgaggttgtgtagatgtggccggcacccttgagagtggagctagggggtgcagactgagcagtgaacagaaggagccttggacagggctgggccagcctcccgagttccaggagcgaattgcaaacccaccgggaaaatgagcgaagagacggtccccgaggctgcctcgccgccgcccccgcaggggcagccttactttgaccgcttctcagaggacgaccccgagtacatgcgccttcgcaaccgggcggcggacctgcggcaggacttcaacctgatggagcagaagaagcgcgtcaccatgatcctgcagagtccctctttcagggaggagctggaaggcctcatccaggagcagatgaagaaggggaacaactcctccaacatctgggccctgcgacagatcgcggacttcatggccagcacctcccacgcagtcttcccgacatcttccatgaatgtctccatgatgacgcctatcaatgacctccacacagctgactccctgaacctggccaaaggggagcggctcatgcggtgcaagatcagcagtgtctaccgactcctggacctctatggctgggcccagctgagtgacacctatgtcacgttgagagtcagcaaggagcaggaccacttcctgatcagccctaagggagtttcttgcagtgaagtcacagcgtccagcctgatcaaggtgaacattctgggagaggtggtggagaagggcagcagctgcttcccagtggacaccacaggcttctgtctgcactcggccatctatgcagcgaggcccgacgtgcgctgcatcatccacctgcacacaccggccacagcagcggtgtcggccatgaagtggggcctcctgcctgtctcccacaatgccctgctggtgggggacatggcctattatgacttcaatggggaaatggagcaggaagccgatcggatcaacctgcagaagtgccttggacccacctgcaagatcctggtgctaagaaaccatggagtggttgctctgggtgacacggtagaggaggcattttacaagatcttccacctgcaggctgcatgtgagatacaggtgtcggctctgtccagtgccgggggagtggagaacctcatcctcctggagcaggagaagcaccggccccatgaggtgggctccgtgcagtgggccgggagcacctttgggcctatgcagaagagtcggctgggggagcatgagtttgaggccctcatgaggatgctggacaacctgggctacagaacaggttacacgtatcgccacccctttgttcaagagaaaaccaaacacaaaagtgaggtggagattccagccacggtcacagccttcgtgtttgaggaggacggtgccccggtgcccgccctgcgacagcatgcccagaagcagcagaaggagaagacccgctggctcaatacgcccaacacctacctgcgggtcaatgtggccgatgaggtccagaggagcatgggcagcccccgacccaagaccacgtggatgaaggctgacgaggtggagaaatccagcagtggcatgccgattcgcatcgaaaacccaaaccaatttgtgcctctctatactgacccccaggaagtactggagatgaggaacaagattcgagaacaaaaccgacaagatgtgaagtcagcggggcctcagtcccagctcctggcgagcgtcattgccgagaagagccgaagcccgtctacagagagccagctgatgtccaagggagacgaggataccaaagacgattcagaggagacggtgcccaaccccttcagccaactcactgaccaggagttggaggagtacaagaaagaggtggagaggaagaaactagaacttgatggagagaaagaaactgccccagaagagcctggctcacctgcaaagtctgcacctgcttctccagtgcagagcccagcgaaggaggcagagacaaagagccctttagtctctccttccaagtctttagaggaaggtactaagaagacagaaacaagcaaagccgccaccacagagcccgaaacaacccagccggaaggggtggtggtcaacgggagggaggaggagcagacggcagaggaaatcctcagcaaaggcctgagccagatgaccaccagtgctgacacggatgttgatacctctaaggacaaaaccgagtcggtcaccagcggccccatgtccccagagggctcaccttccaagtctccctcaaagaagaaaaagaaattccgaaccccctccttcctgaaaaagagcaaaaagaaggagaaagtggagtcctgattcatgacacccttgggctccctcctgcctcctctctctcctccccttcccttctcccatctctgtccctgcaagcacagggctaaggagggat

SEQ ID NO: 417 - DNA, 974 bp, Homo sapiens
gtgggagggaggctcggcgctcaggaagcatggcactctggcgggcataccagcgggccctggccgctcacccgtggaaagtacaggtcctgacagctgggtccctgatgggcctgggtgacattatctcacagcagctggtggagaggcggggtctgcaggaacaccagagaggccggactctgaccatggtgtccctgggctgtggctttgtgggccctgtggtaggaggctggtacaaggttttggatcggttcatccctggcaccaccaaagtggatgcactgaagaagatgttgttggatcaggggggctttgccccgtgttttctaggctgctttctcccactggtaggggcacttaatggactgtcagcccaggacaactgggccaaactacagcgggattatcctgatgcccttatcaccaactactatctatggcctgctgtgcagttagccaacttctacctggtcccccttcattacaggttggccgttgtccaatgtgttgctgttatctggaactcctacctgtcctggaaggcacatcggctctaagcctgcctcactccatcgtttccaccttgcagtgatgcagcttgaccctggaacggtcagacaacctcctcaaagtgggcataccagtttccacggggttgggttgccggtcagagcttaagaggactagcacctgcaatgccctcttcactctaaatgtacactgactgctttagagcccttgataatagtcttattcccaccacatactaggcactccataaatatctgttgaaccttcatgaccttatcaactttacacccatatccagcaaatgccactcatccccactcttcatagacacatttgttactctaaccctgcctaggcttcttgtagctccagctctttagagactccgggaaccctttatatggtgcctcagtaaatatgttattaaatatgtaatccgg

SEQ ID NO: 418 - DNA, 5867 bp, Homo sapiens
cgccgccgccgccgccgccagcgctagcgccagcagccgggcccgatcacccgccgcccggtgcccgccgccgcccgcgccagcaaccgggcccgatcacccgccgcccggtgcccgccgccgcccgcgccaccggcatggcgctccggggcttctgcagcgccgatggctccgacccgctctgggactggaatgtcacgtggaataccagcaaccccgacttcaccaagtgctttcagaacacggtcctcgtgtgggtgccttgtttttacctctgggcctgtttccccttctacttcctctatctctcccgacatgaccgaggctacattcagatgacacctctcaacaaaaccaaaactgccttgggatttttgctgtggatcgtctgctgggcagacctcttctactctttctgggaaagaagtcggggcatattcctggccccagtgtttctggtcagcccaactctcttgggcatcaccatgctgcttgctacctttttaattcagctggagaggaggaagggagttcagtcttcagggatcatgctcactttctggctggtagccctagtgtgtgccctagccatcctgagatccaaaattatgacagccttaaaagaggatgcccaggtggacctgtttcgtgacatcactttctacgtctacttttccctcttactcattcagctcgtcttgtcctgtttctcagatcgctcacccctgttctcggaaaccatccacgaccctaatccctgcccagagtccagcgcttccttcctgtcgaggatcaccttctggtggatcacagggttgattgtccggggctaccgccagcccctggagggcagtgacctctggtccttaaacaaggaggacacgtcggaacaagtcgtgcctgttttggtaaagaactggaagaaggaatgcgccaagactaggaagcagccggtgaaggttgtgtactcctccaaggatcctgcccagccgaaagagagttccaaggtggatgcgaatgaggaggtggaggctttgatcgtcaagtccccacagaaggagtggaacccctctctgtttaaggtgttatacaagacctttgggccctacttcctcatgagcttcttcttcaaggccatccacgacctgatgatgttttccgggccgcagatcttaaagttgctcatcaagttcgtgaacgacacgaaggccccagactggcagggctacttctacaccgtgctgctgtttgtcactgcctgcctgcagaccctcgtgctgcaccagtacttccacatctgcttcgtcagtggcatgaggatcaagaccgctgtcattggggctgtctatcggaaggccctggtgatcaccaattcagccagaaaatcctccacggtcggggagattgtcaacctcatgtctgtggacgctcagaggttcatggacttggccacgtacattaacatgatctggtcagcccccctgcaagtcatccttgctctctacctcctgtggctgaatctgggcccttccgtcctggctggagtggcggtgatggtcctcatggtgcccgtcaatgctgtgatggcgatgaagaccaagacgtatcaggtggcccacatgaagagcaaagacaatcggatcaagctgatgaacgaaattctcaatgggatcaaagtgctaaagctttatgcctgggagctggcattcaaggacaaggtgctggccatcaggcaggaggagctgaaggtgctgaagaagtctgcctacctgtcagccgtgggcaccttcacctgggtctgcacgccctttctggtggccctgtgcacatttgccgtctacgtgaccattgacgagaacaacatcctggatgcccagacagccttcgtgtctttggccttgttcaacatcctccggtttcccctgaacattctccccatggtcatcagcagcatcgtgcaggcgagtgtctccctcaaacgcctgaggatctttctctcccatgaggagctggaacctgacagcatcgagcgacggcctgtcaaagacggcgggggcacgaacagcatcaccgtgaggaatgccacattcacctgggccaggagcgaccctcccacactgaatggcatcaccttctccatccccgaaggtgctttggtggccgtggtgggccaggtgggctgcggaaagtcgtccctgctctcagccctcttggctgagatggacaaagtggaggggcacgtggctatcaagggctccgtggcctatgtgccacagcaggcctggattcagaatgattctctccgagaaaacatcctttttggatgtcagctggaggaaccatattacaggtccgtgatacaggcctgtgccctcctcccagacctggaaatcctgcccagtggggatcggacagagattggcgagaagggcgtgaacctgtctgggggccagaagcagcgcgtgagcctggcccgggccgtgtactccaacgctgacatttacctcttcgatgatcccctctcagcagtggatgcccatgtgggaaaacacatctttgaaaatgtgattggccccaaggggatgctgaagaacaagacgcggatcttggtcacgcacagcatgagctacttgccgcaggtggacgtcatcatcgtcatgagtggcggcaagatctctgagatgggctcctaccaggagctgctggctcgagacggcgccttcgctgagttcctgcgtacctatgccagcacagagcaggagcaggatgcagaggagaacggggtcacgggcgtcagcggtccagggaaggaagcaaagcaaatggagaatggcatgctggtgacggacagtgcagggaagcaactgcagagacagctcagcagctcctcctcctatagtggggacatcagcaggcaccacaacagcaccgcagaactgcagaaagctgaggccaagaaggaggagacctggaagctgatggaggctgacaaggcgcagacagggcaggtcaagctttccgtgtactgggactacatgaaggccatcggactcttcatctccttcctcagcatcttccttttcatgtgtaaccatgtgtccgcgctggcttccaactattggctcagcctctggactgatgaccccatcgtcaacgggactcaggagcacacgaaagtccggctgagcgtctatggagccctgggcatttcacaagggatcgccgtgtttggctactccatggccgtgtccatcggggggatcttggcttcccgctgtctgcacgtggacctgctgcacagcatcctgcggtcacccatgagcttctttgagcggacccccagtgggaacctggtgaaccgcttctccaaggagctggacacagtggactccatgatcccggaggtcatcaagatgttcatgggctccctgttcaacgtcattggtgcctgcatcgttatcctgctggccacgcccatcgccgccatcatcatcccgccccttggcctcatctacttcttcgtccagaggttctacgtggcttcctcccggcagctgaagcgcctcgagtcggtcagccgctccccggtctattcccatttcaacgagaccttgctgggggtcagcgtcattcgagccttcgaggagcaggagcgcttcatccaccagagtgacctgaaggtggacgagaaccagaaggcctattaccccagcatcgtggccaacaggtggctggccgtgcggctggagtgtgtgggcaactgcatcgttctgtttgctgccctgtttgcggtgatctccaggcacagcctcagtgctggcttggtgggcctctcagtgtcttactcattgcaggtcaccacgtacttgaactggctggttcggatgtcatctgaaatggaaaccaacatcgtggccgtggagaggctcaaggagtattcagagactgagaaggaggcgccctggcaaatccaggagacacgtccgcccagcagctggccccaggtgggccgagtggaattccggaactactgcctgcgctaccgagaggacctggacttcgttctcaggcacatcaatgtcacgatcaatgggggagaaaaggtcggcatcgtggggcggacgggagctgggaagtcgtccctgaccctgggcttatttcggatcaacgagtctgccgaaggagagatcatcatcgatggcatcaacatcgccaagatcggcctgcacgacctccgcttcaagatcaccatcatcccccaggaccctgttttgttttcgggttccctccgaatgaacctggacccattcagccagtactcggatgaagaagtctggacgtccctggagctggcccacctgaaggacttcgtgtcagcccttcctgacaagctagaccatgaatgtgcagaaggcggggagaacctcagtgtcgggcagcgccagcttgtgtgcctagcccgggccctgctgaggaagacgaagatccttgtgttggatgaggccacggcagccgtggacctggaaacggacgacctcatccagtccaccatccggacacagttcgaggactgcaccgtcctcaccatcgcccaccggctcaacaccatcatggactacacaagggtgatcgtcttggacaaaggagaaatccaggagtacggcgccccatcggacctcctgcagcagagaggtcttttctacagcatggccaaagacgccggcttggtgtgagccccagagctggcatatctggtcagaactgcagggcctatatgccagcgcccagggaggagtcagtacccctggtaaaccaagcctcccacactgaaaccaaaacataaaaaccaaacccagacaaccaaaacatattcaaagcagcagccaccgccatccggtcccctgcctggaactggctgtgaagacccaggagagacagagatgcgaaccacccaaaacacgcacaccctgcccctggtgccctgagacagacacacagcctcacgcccccaggaatgcaagtggtttcctggtgcttcccacggaggagttttggcagccagacttctggaggaattggttgtatagaagatcctagtgaccaaattcagcctactgcctcggatctctccagccgaagtctgtggactgcaagtctttgagatgcttctggctcccatcacctctaacatccttgtctgggtctaccaggaacgcttcatttccttggggctgcagttttgtggttagaggggcctggagaaaatcattttctccccttggcagtgtcccagggccctggatggtcctcttaccaacatctggtcttccaggcactcaaaagctgggaaccacgatctcagcgccacgtctaccagttctcgttttgggccagaggcagcctctgcactcccacgcctgtcctcctggaagggacctggttggactaacggctaacctggacctggaactgtagggccaggggattgtctcagggccgacgttccacctggggcttccctccccacccacccccactccaggctttcccttttttcttttgttcaacattgtaagaacaatcaatgctgttattactgttcccaccatgattgatgtggggtaaatattaaggagatggcctcatgggaatttgaccttgactagaaatagagactgagagtgagcaaccagctggaaggtactatgccagtcctagcagaaaaatgtgttaggcctggcccaaagcagtgttggttgcttacagtgttgattgattttgttcttttttcttaccacctcttttctttccctctcatggtacctgctcatggttatgaagctttcaaagtaaagaacacgaaatac

SEQ ID NO: 419 - DNA, 1569 bp, Homo sapiens
caaaatctcaaccatgatcttgagatggcaaaggttttaaatacgttttggaaatatactcattggtatatttcttttgagaaggctgaaatgtagctggggacagcaggttgatcacaagggacgatgatatgaggtaagcacacaagagctatggacaagacaaggtctaaaggattttgaatacaaagcagaaatatttcgaccttctcatttctggggtgggagtggggagtgttcattaagtacatatgacaagagggagtgtggggagaaggtgaaacagtagactacatttatggattaagtagggaatgtgaacaaagatgttaaagtcatggcgatccggtagacagattacacagaaggggaccgaagatgaactggacaaatactctgaggctctcaaagatgcccaggagaagctggagctggcagagaaaaaggccaccgatgctgaagccgacgtagcttctctgaacagacgcatccagctggttgaggaagagttggatcgtgcccaggagcgtctggcaacagctttgcagaagctggaggaagctgagaaggcagcagatgagagtgagagaggcatgaaagtcattgagagtcgagcccaaaaagatgaagaaaaaatggaaattcaggagatccaactgaaagaggccaagcacattgctgaagatgccgaccgcaaatatgaagaggtggcccgtaagctggtcatcattgagagcgacctggaacgtgcagaggagcgggctgagctctcagaaggccaagtccgacagctggaagaacaattaagaataatggatcagaccttgaaagcattaatggctgcagaggataagtactcgcagaaggaagacagatatgaggaagagatcaaggtcctttccgacaagctgaaggaggctgagactcgggctgagtttgcggagaggtcagtaactaaattggagaaaagcattgatgacttagaagagaaagtgctcatgccaaagaagaaaaccttagtatgcatcagatgctggatcagactttactggagttaaacaacatgtgaaaacctccttagctgcgaccacattctttcattttgttttgttttgttttgtttttaaacacctgcttaccccttaaatgcaatttatttacttttaccactgtcacagaaacatccacaagataccagctaggtcagggggtggggaaaacacatacaaaaagcaagcccatgtcagggcgatcctggttcaaatgtgccatttcccgggttgatgctgccacactttgtagagagtttagcaacacagtgtgcttagtcagtgtaggaatcctcactaaagcagaagaagttccattcctttctgattggcacacgtgcagctcatgacaatctgtaggataacaatcagtgtggatttccactcttttcagtccttcatgttaaagatttagacaccacatacaactggtaaaggacgttttcttgagagttttaactatatgtaaacattgtataatgatatggaataaaatgcacattttaggacattttctaaa

SEQ ID NO: 420 - DNA, 638 bp, Homo sapiens
gcgggaaataacaattttgtatgtcaatttatccaaggatgttttcttaaaccgcatgactattcagatggctactgagttatcagtggccatttattagcatcatatttatttgtattttctcaacagatgttaaggtacaactgtgtttttctcgattatctaaaaaccatagtacttaaattgaacagttgcaaagatgtcttaattgtgtaaagaattggtgtagtcatgactttagctgatactcttatgtacgagatctgtctctgctgtttaacttcattggattaatcagctggtttcaactctactgcgaaacaaaaatagctccttaaaagtactgttctccttcagtggcatgtagttatctaatcaagacacctcattcaaacaaaacctgccttaggaaaatttaatatattttaaattattttaaaagaaatacaacatcttaatctttagctttcttaatcggtgctttatggaggccagtgtaacgttacatgactcgttgagaaagttgaggaatttcctctaccacctttgttgcttgaagaaaaacatgtcttttcaaaatgagaggctttcattgaagaaaagaaaaaaacaacagttaagagccaaaaaaaataaaa

SEQ ID NO: 421 - DNA, 5894 bp, Homo sapiens
attctgggtcctcctcaccagataccaaagtgaaacctgaaacaccgccaagacaaagtcactcagggtctatttcaccataccccaaagtaaaggcccaaactccaccggggccaagtctttctggatcaaagtcaccatgtccccaagagaagtctaaagactcactagttcaaagttgccctggatccctctctctctgtgcaggagtaaaatctagcacaccaccaggcgagagctattttggtgtctcatctctgcaactgaaaggacaatctcaaacttcaccagaccacagatctgatacttcaagtccagaagtgagacagagtcattcagaatcaccatctctgcagagcaaatctcaaacatcacctaagggaggtcggtccaggtcttcatctccagtcactgagctggcatccagatctccaataagacaagatagaggtgagttctcagcgagtcctatgttgaaatctggaatgtctcctgagcagagcaggttccagtctgactcttcttcatatcctacagtggactcgaattctctcttggggcagagtagattggagactgctgaatcaaaagagaaaatggccttaccccctcaggaggatgctactgcatcacctcctagacagaaagacaaatttagtccctttccagtacaggataggcctgagtcttcactggtattcaaagacacacttagaaccccgccaagagaaagaagtggtgctgggtcatctccagaaacaaaagagcaaaatagtgcattgcctacgtcaagccaagatgaagagttaatggaggtggtagagaagtctgaagaacccgcaggccaaatcctgtctcatttgtcttcagaacttaaagaaatgtccacaagtaactttgaatcatctcctgaagtagaagaaaggcctgctgtgtctttgactcttgatcagagccagtcacaggcttctttggaagcagtagaagtcccttcaatggcctcatcttggggtgggccacatttttctccagaacataaagaactgtctaactccccactcagggagaacagctttggatcacctttagaatttagaaactcaggcccacttggtacagaaatgaatactggattttcttctgaggttaaagaagatttgaatggaccgtttcttaatcagctggaaacagatccatctctagacatgaaagaacaatcgacaagatcctctggacacagcagttctgagttatccccagatgcagtggaaaaggcagggatgtcttcaaatcagagcatctcttcacctgtgcttgatgctgtacccagaacaccctcgagagaaagaagtagttctgcatcttctcctgaaatgaaagatggtttacccagaactccatcaaggagaagcaggtctgggtcttctccaggacttagagatgggtctgggactccctcgaggcacagcctgtctgggtcctctcctggaatgaaagatatacctagaacgccatctagagggagaagcgaatgtgattcttccccagaaccgaaagctttgcctcagactcctaggccgaggagtcgttctccatcatccccagagctcaacaacaagtgtcttaccccccagagagaaagaagcgggtcagaatcatcagttgatcagaaaactgtggctcggactcccctggggcagagaagtcgttcgggatcctctcaagaacttgatgtgaaacccagtgcatcccctcaggaaagaagtgagtcagactcttctccagattctaaagccaagacacgaaccccacttcggcagaggagtcggtctggatcatctccagaggttgacagcaaatctcgactatcccctcggcgcagtaggtctggttcctcccctgaagtgaaagataagccaagagcagcacccagggcacagagtggttctgattcctctcctgaacctaaagctccagcccctcgggcccttcccagacgaagcagatcaggttcatcaagcaaaggcagaggcccttctcctgaaggaagcagcagtaccgagtcctctcctgaacatccgcccaaatccagaactgctcgcagaggttccaggtcatcaccagagcccaagaccaagtctcgtacaccacctcgacgtcgcagctctcgatcatctccggagctaacaaggaaggccagactgtcccgtagaagccgctctgcctcatcctcaccagaaactcgctctagaactcccccaaggcaccggagaagtccctcagtgtcttccccggagccagccgaaaaatcgaggtcttcacgccgacggcgctcagcttcatctccacgcactaagacaacctcaaggagaggccgctctccttcgccaaagcctcgtggactccagaggtcccgttcccgctcaaggagagagaaaacaagaacaacccgacgtcgagataggtctggatcttctcagtcaacctctcggcgaagacagcggagccggtcaaggtcgcgggttactcggcggcggaggggaggctctggttatcactcaaggtcacctgcccggcaggaaagttcccggacctcctctcgacgccgaagaggccgctctcggacacccccaaccagtcggaagcgttctcgctcacgcacatcaccagccccgtggaaacgctctagatctcgagcctctccagccactcaccggcgatccaggtccagaacccccctgataagccgacgtaggtccagatctcgaacttcaccagtcagccggagacggtcaaggtccaggacttcagtgactcgacgaagatcccggtcaagagcatccccagtgagcagaaggcgatccagatccagaacgccaccagtaacccgccgtcgttcaaggtctagaacgccaacaacacgccgccgctcccgttctagaactccaccagtgactcgcagaaggtccagatccaggactccaccagtaaccaggaggcgatctcgaagcagaacttcgcctatcactcgcagaagatcaagatccagaacatctccggtcacccgaaggagatctcgatctcgcacatctccagtaactcgaagaaggtcccgctctcgaacctcaccagtgacacgccgccgctctaggtcccggacacctccagctattcggcgccgctctagatctcgaacgccactgttaccacgcaaacgttctcgaagtcgctcaccacttgctatccgccgccgctccagatcccgtactccacgaacagctcggggtaaacggtccttaacaagatctcctccagccatccgcaggcgttctgcatctggaagtagttctgatcgttcacgatctgctactcctccagcaacaagaaatcattctggttcacggacacctccagtagcactcaacagttccagaatgagctgcttcagtcgtcctagcatgtccccaacacctcttgatcgctgcagatcacctggaatgcttgaaccccttggcagctctagaacacccatgtctgtcctgcagcaagccggcggctccatgatggatggtccaggtccccgaatacctgaccaccagagaacatctgtgccagaaaatcatgctcagtccaggattgcacttgccctgacagctatcagtcttggcaccgctcggcctcctccgtccatgtctgctgctggccttgctgcaagaatgtcccaggttccagccccggtgcctctcatgagtctcagaaccgcaccagcagccaaccttgccagcaggattcctgcagcctctgcggcagccatgaacctagccagcgccaggacacctgccattccaacagcagtgaacctggctgactctcgaacgccagctgcagcagcggccatgaacttggccagccccagaacagcggtggcaccttcggctgtgaacctggctgaccctcgcactcccacagccccagctgtgaacctagcaggggccagaaccccagctgccttggcagctctgagtctcacaggctctggcacaccaccaactgctgcaaactatccctccagctccagaacaccacaggctccagcctctgcaaacctggtgggtcctcggtctgcacatgccacagctcctgtgaatattgccggctccagaaccgccgcagccttggcccccgcgagcctcaccagtgctaggatggctccagcattgtctggtgcaaacctcaccagccccagggtgcccctttctgcctacgagcgtgtcagtggcagaacctcaccaccgctccttgaccgagctaggtccagaacaccaccgtctgccccaagccaatctaggatgacctctgaacgggctccctccccttcctctagaatgggccaggctccttcacagtctcttctccctccagcacaggatcagccgaggtctcctgtgccttctgctttttcagaccaatcccgttgtttgattgcccagaccacccctgtagcagggtctcagtccctttcctctggggcagtggcaacgaccacgtcctctgctggtgatcacaatggcatgctctctgtccctgcccctggggtgccccactctgatgtgggggagccacctgcctctactggggcccagcagccttctgcattagccgccctgcagccagcaaaggagcggcggagttcctcctcgtcgtcgtcgtcctctagctcctcctcctcttcatcatcgtcgtcgtcgtcctcctcctcctctggctccagttctagtgactcagagggctctagccttcctgtgcaacctgaggtggcactgaagagggtccccagccccaccccagccccaaaggaggctgttcgagagggacgtcctccggagccaaccccagccaaacggaagaggcgctctagcagttccagttccagctcctcctcttcatcttcctcctcctcctcctcctcctcttcttcctcctcctcttcctcttcttcttcttcctcctcatcttcctcctcctcgtcgtcttcctccccttcccctgctaagcctggccctcaggccttgcccaaacctgcaagccccaagaagccaccccctggcgagcggaggtcccgcagcccccggaagccaatagactccctcagggactctcggtccctcagctactcgcctgtggagcgtcgccgtccctcgccccagccgtcaccacgggaccagcagagcagcagcagtgagcggggttcccggagaggccagcgtggggacagccgctcccccagccacaagcgcaggagggagacacctagccctcggcccatgagacaccgctcctccaggtctccataaattgtctttgggggattccaccacacccaatgctctggagccacaaggagtgtcccttcttccccagcagagccgtgggagggtccttgtctgctctcctttgaaccttggcagcccttggatggagggctccctttccctccccttttttttttctttgttcctgtgaaatgttaatctccgtgagttcttcctggttcatgtgttctggggggtttggggtgggagggaatgcagatgggagttgggggaggggaggatacagttcaggataccccagcctggagtcagggccagggaggcatggccccacttgtatccagaagttcccaggggtgattgtgatggtggttgggactggaggttgtataaggtgttcttggaaggaaggggcaggagttggaattagttggtccctactgtcccccatgaggttgtgaacccctccccccaacttttcatgtttcttaaaggcattttggttttttaaaatctgtacagcaagagcaactttttctgtcaaataaaaatgagaaatgc

SEQ ID NO: 422 - DNA, 5399 bp, Homo sapiens
gtaatatggcggggaggaggaggagaaggcggcggcggaccgagctgcgctctgtcagtaccatttgagccattcgcttcctgacaaggcccgtggcgaggggagaggagctgaaggggccgtgggggatcagtgcctgctgtgtgctgatactgttctgtgtaatggggattcagtgaacaagactgaaaaggtacctgtacttatggcgcttacattttggtggaggaagacagacaaaaatcaaggaaataaacacgataatttcagatagtgtgtgactgtgggaagatggaggagtatgagaagttctgtgaaaaaagtcttgccagaatacaagaagcatcactatccacagagagctttctccctgctcagtctgaaagtatctcacttattcgctttcatggagtggctatcctttctccactgcttaacattgagaaaagaaaggaaatgcaacaagaaaagcagaaagcacttgatgtagaagcaagaaagcaggttaacaggaagaaagctttactgactcgtgtccaggagattcttgacaatgttcaggttagaaaagcacctaatgccagtgattttgatcagtgggagatggaaacagtttactctaattcagaagtcagaaacttgaatgttcctgctacatttccaaatagctttccaagccatacggaacactctactgcagcaaagcttgataagatagctgggattttgccattggataatgaggaccaatgtaaaactgatggaatagacttagctagagattcagaaggatttaattctccgaagcaatgtgatagttccaatattagtcatgtagaaaatgaagcttttccaaagacctcttcagcaaccccacaagaaactcttatttctgatggtcccttctcagtaaatgaacaacaggatctaccacttttggcagaagtcatcccagatccctatgtaatgagtcttcagaatctgatgaaaaagtcaaaggaatatatagaaagagaacaatctagacgcagtctgagaggtagtatgaacagaattgttaatgagagtcatttagacaaagaacatgatgctgttgaagtggctgactgtgtaaaagagaaaggccagttgacaggcaaacactgtgtctcagttattcctgacaaaccaagccttaataaatcaaatgttcttctccaaggtgcttccactcaagcaagcagcatgagtatgccagttttagctagcttttcgaaagtggacatacctatacgaactggccatcccactgttctagagtctaattctgattttaaagttattcccactattgttaccgaaaataatgttatcaaaagtcttacaggttcatatgccaaattacctagtccagagccaagtatgagtcctaaaatgcaccgaagacgttccaggacatcatcagcgtgtcatatacttataaataacccaataaatgcctgtgaattaagccctaaaggaaaagaacaggcaatggacttaattattcaagatactgatgaaaacacaaatgtgcccgaaattatgccaaagttaccaactgatttagcgggagtttgttcaagcaaggtttatgtgggcaaaaatacatctgaagtcaaagaagatgtggttttaggtaaatcaaatcaggtatgtcaatcttcaggaaatcatttagaaaataaagttactcatggacttgttactgtggaaggtcagttaacatccgatgagagaggcgcacacataatgaacagtacctgtgctgcgatgccaaagctgcatgaaccatatgccagcagtcagtgtatagcaagtccaaactttggaactgtgagtggactcaagccagccagtatgttagagaaaaactgcagtttgcaaacagaactgaataagtcttatgatgtaaaaaacccttctcctttattgatgcaaaaccagaatacgagacagcagatggacacacctatggtgtcctgtggaaatgaacaatttttggataacagttttgagaaagttaaacggagacttgatttagatattgatggtttgcaaaaagaaaactgcccttatgtcataacaagtggaataactgaacaagaaaggcaacatttgccagaaaaaagataccctaagggatctggcttcgttaacaagaataaaatgttaggaactagttccaaagaaagcgaggagttactaaaaagcaagatgttagcttttgaagaaatgcggaagagactagaagaacagcacgcccagcaattatcactactcatagctgagcaggaaagggaacaagaaagactgcaaaaggaaatagaagagcaggagaaaatgttaaaagagaagaaggcaatgacagcggaagcctctgagttggacattaacaatgcagtggaattagaatggagaaaaataagtgactctagtttgctggaaacaatgctgtctcaagcggactcactccatacttcaaattcaaatagttctggtttcaccaattctgccatgcaatatagctttgtttctgcaaacgaagcaccattctacctctggggatcatcaactagtggcttgaccaaactctcagtaacaaggccttttggaagagccaaaactagatggtctcaagtttttagtctggaaatacaagcaaaatttaacaaaataactgcagtggcaaaaggatttcttactcgtagacttatgcagacagataagctgaagcaacttcgacaaactgtaaaagatactatggaattcataagaagttttcagtcagaagcaccattaaagagaggcattgtttcagctcaagatgcttcacttcaggaaagagtgttagctcagttgcgagctgccttgtacggtattcatgacatattctttgtaatggatgcagctgaaagaatgtctattctacatcatgatcgagaagttcgcaaagagaaaatgctcaggcaaatggataaaatgaaaagtccacgagtggctctttcagctgcaacacagaagtctcttgataggaagaaatacatgaaagctgctgaaatgggaatgccaaataagaaatttctggttaaacaaaatccttctgaaacaagagtccttcagccaaaccaaggacagaatgcacctgttcataggctacttagtagacaagggagtatatgcaggaaaaatccaaagaaagcggccaaatgttgcgacaatttaagaagacaacattcattaggataaaatggggggaaggattattattcatgttattttccctgcccaagactttatttaaccctggactccgtttacacagacaaagtgacatcagaaggctgagcacttatctggatcatttggtcagtttggtaattcctgctccacacccctattttcctcttaataatacgtttgggtgaagacaaattagtgtttagtaattgcatcatctctgtgcttacctatacaaacataagtttattttatatgcccagatgtctacagagaccctttttgtaaatgtcaaggacatttggatttacttttacagaatattgaaaagataagacaaattataaataagttctaaaacataaatttaattcatctctgcatagtgatttttgaatttgattcaaagggaaattattgcagaagaatgcctttccctcattttataactttaaaaacttggattaaccactcaatgtccactttctttgacttacagtataaccatgtagccaattgtggcccactaaaatctacagaagttaatgtgggtcaccattttggtcagaagcatacattcctgtcagacaactagttgtctgacagaaatgttaggcttcatgtatgttaccccagtactgttagaaacatttgtactaggttataagatctttctgtgacaggtaacaaatttggggaagacagcacaatcttcttgaatgtagctcttgggaatgcattattacatccatttctgtaacataataatatgttgcatgcagttatattttctatttagtctgtatattttgttcttcatagtctgttttttctagcatgcttgatttaggagagaataaagggctatataataataaatccagatttccggataagaatattgcctggttaaaattctgcattgcttaaagacacccatgtttaagatttttcatcactaacatatccattaaaagtatcaactggccaggcagggtggctcacacctgtactcccagcattttgtgaggccaaggtgggtggatcacctgaggtcaggagtttgagaccagcctgaccaaacatggcgaaaccccatctgtactgaaaatacaaaaattaggcatggtggtgcatgcctgtagttccagctacttgggaggctgagacaggcgaattgcttgaacctgggaggcagaggttgcagtgagctgagactgtgccattgcactccagtcgggttaacagagcaagacactgtctcaaaaaaaaaaaaaaaaaaaagtatcaaccaacaaatgttaccaagataacgtgacttcatgagggagaatgtcactattaatttatcataccatttccaaaaagggctttgtgcttttcacataaaattgagacagtgtatatttaatctaatttaaattttaaagagatactggtattttgaaaatgcaacctatatatattcttaatatccttttaagaatatggagatgaagattgttttctccaattttctgtgccattttaaatttaactttgacatccagctatagacagaaataataagccaccctgggtgtaaacttgattttctttattgagatgtatcatgtattgaatgagtgaaccagaaaattagaagatggtcaaaaaaagtccaagttaccaattttttaaaatttataggcaaagtatcaaattgtcttcttaatatgataaactgtgctttatcattctgaaactcaggatacagcttattcatagcattgtgggtctctccagtaagaaagatgctaaaagttttgtgcactttttgtgtgtgtaatgcaaattagttaaaacaaatagttttggagaaagttaaaactagctttagagtaaggatgagaaacttgagtgtttttaatttaaagataaaagcctgtgttttacacattcttttttggtgttcatagcttcttctcatacaggtgccagacactgtttgtgcttttgatggatttttatttatatactttttttgcttatttttactttgagtggaatgttcattaatgtaaattgtatttatttttatacttttattttcactagttttgcttctaggcaaaaagcaaaataaacttttcatcttaaag

SEQ ID NO: 423 - DNA, 6072 bp, Homo sapiens
cagaagcactgctgcatcatgctaacgagctgatcagatttgaagagttcatttccgacttgccccccaggttaccactaaaaatgccacagtgccacactctgctctatgtttataacctaccagcaaataaggatggcaagagcgtcagcaacaggctcagacgcctgtccgataattgtggtgggaaagtgctgagtatcacaggctgcagtgcaattctccgcttcataaaccaagatagtgcagagcgcgctcagaagcgaatggaaaacgaagatgtctttggtaataggatcattgtgtcatttactccaaaaaatagagaactctgtgaaacaaagagttcaaatgcaattgctgataaagtgaagtctcccaaaaaacttaagaatccaaaattgtgcctcatcaaagatgcaagtgaacaatcttccagtgccaaagccacgcctggaaaagggtcacaggcaaattctggatctgctacaaaaaatacaaatgttaaaagtttacaggagctgtgccgcatggagtcaaaaactggtcatagaaacagtgagcaccagcaaggtcacctgaggctggtcgtacccactcacggtaactcaagtgctgcagtgtcgacgccgaaaaactcgggggtggcagaacccgtttacaaaaccagtcagaaaaaggagaacctcagtgcccgaagtgttaccagttctcctgtagagaaaaaagataaagaggagactgtattccaagtgagttacccgtctgcttttagcaagttagttgcatccaggcaagtcagtcctctgctcgcatctcagtcttggtcttctagagcatccccgcttgctttcaacattgcaaattcgagcagcgaagccgactgcccagacccatttgcaaatggtgctgatgtccaagtcagcaacatagactacagattatcccggaaggagctgcagcagctcctgcaggaagcatttgccaggcatggcaaggtgaagagtgttgagctcagcccccatacagattatcaactcaaggctgttgtgcaaatggaaaacttacaagatgcgatcggtgcagtgaatagcctccacagatacaaaattggcagcaaaaagatcctggtctcacttgccaccggggctgccagcaaatcactctctttactgagtgcagaaacaatgtctgttcttcaggatgcccctgcctgttgcctgcctctgtttaaatttacagatatctatgaaaaaaagtttggacacaagttgaatgtgtcagatctatataaattaacagacacggtcgcaatccgtgaacaaggaaacggacggctggtgtgtctcctacccagcagtcaggcccgccagagccccttggggtcttcccagtcacacgacggctcctccacgaattgcagcccaattatatttgaagagttagaatatcacgagcctgtctgcagacagcattgttccaataaggatttcagcgaacatgaatttgatccagactcttacaagattccttttgtgattctttctttgaagacatttgcgccccaggttcacagtcttctccagacccacgagggcaccgtgcctttattgagctttccagattgttacattgcagagtttggcgatctagaagtagtgcaagaaaaccaaggaggtgttcccttagaacacttcattacctgtgttccaggtgtaaacattgccactgctcagaatgacatcaaagtggttaaatggattcacaacaagcccccgcctcccaacactgacccttggcttctgcgttcgaagagtcctgtaggtaacccccagctgatccagttcagtagagaagtgattgacttgctgaaaagccagccatcttgtgtcatacccatcagtcatttcatcccatcctatcaccatcattttgcaaagcagtgccgagtgtcagactacggatactccaagctgattgagttattagaagcagtgcctcatgtattgcagattcttggaatgggctccaaacgtctgctgacccttacccacagggcccaggtgaagcgctttactcaggatttactaaaacttctcaaatcccaggccagcaaacaggtcattgtgagagaattctcacaggcttatcactggtgtttctcaaaggactgggatgtcactgaatatggtgtttgtgagttgattgacatcgtatcagagattccagacacaaccatctgcttgtcccaacaagataatgaaatggtgatttgtatccccaaaagagaacgcactcaggatgaaatagaaaggacaaaacagttctccaaggatgtcgttgatttgctgcgtcaccaaccccatttccggatgccctttaataaatttatcccttcttaccatcaccactttggccggcagtgcaaacttgcgtactatgggtttaccaaactacttgaactttttgaagccatacctgatactttacaagtattggaatgtggagaagaaaagatccttactctgacagaggtggagcggttcaaagctctagctgcccagtttgttaaactccttcggtcccaaaaagataactgccttatgatgacagatctccttacagaatatgctaaaacttttggttatacatttcgtctccaagactatgatgtcagttccatttcggctttaactcagaaactctgccatgtcgtgaaggttgccgatatagaatctggcagacagattcagctgatcaaccgaaagtctctgcgatctctcactgcccagttgctggtattgttgatgtcttgggaaggaaccacccatctttctgttgaggagctcaagagacattacgaaagtacccacaacactccccttaacccctgtgaatatggattcatgaccttgaccgaactgctgaagagcctgccatacttggttgaggttttcactaatgataagatggaagaatgtgtgaagctcacaagtctgtatttgtttgcaaagaatgtgcggtctttacttcatacttaccactaccagcagattttccttcatgagttttccatggcctataccaagtatgtcggagaaactctgcagcccaagacctacggccacagcagcgtggaggagctcttgggagcaattccacaggtggtctggataaaaggacatggtcataagagaattgtagtgttaaaaaatgacatgaaaagtcgtttgagttcactcagtctctcccctgccaatcatgaaaaccagccctcggagggcgagcgcatcctggaggtgcccgaatcgcacacagcctcggaactcaagcttggagctgacggcagtgggcccagtcacacagagcaggagcttctccgcctgaccgacgactcccccgtcgacctcctgtgtgcgcctgtcccctcgtgcctgccgtcccctcagctgagaccagaccccgttatcctccaatctgctgatctcattcagtttgaggagcgccctcaagagccttctgaaattatgattttaaaccaagaagaaaaaatggagattccaataccaggaaagagcaaaactctgacctctgactccagctcgtcctgcatctcagcagctgtccccgtgcctccctgcccctcctcggaaacctccgagtcactgctcagcaaggaccccgtggaaagcccggccaaaaagcaacccaaaaatagagtcaaattggcagccaacttttccttagcacctataaccaagctttaactcccatttggaatatagaattaggatgggaaaacactgtctgattctgcacacaaaagtgggtttcaaaaatacatccttttctgtgtcatgaaaaccccccgaagccattgacttcatcttacctgtgttctatcatgtttttcttttccattgaacacagctttgagctgaagtctttcttttcttcttcctttttctttcttttttcaattatttgaagaacttgtggcatttgttaaagaatccttaatatattttaccaaatttttagtaactattatgaaatacaatggtgttccaaaagaagaaagcactaaaaactcaactagcaggaagcggttttgcttccattgagccacgtcggtggtgtcatcctacatgtagcataatagagtctctcagcctttgcttactggtgtttccgacagtattaacccagtgcgtggcatgtctttgaagcaaagcctgtcccgctagcctgtgtgttcacacaccaaaggagaagggtaggcgaggggttcggagtgtattttcaggttggaatgtgaaggttcctggcttccatgtgacttgtaagtgtgccttgttttttatttaaactatgtctgtagttgacaaaagtggcttcatcacaaatttttttaaacgtttctactttggggttccatttaggagctttctagaaagttgaggatgtttgaagcttcccttctgtgttccagtttgatatgggttaggttaaggaaaaggagatggtctcgatgtcatggatttaaagtcagcatttggattacaacacacattattgtgtgtcgagaggcagcattggaaagagcctgattttctaaaatatgcatcaagtgcataaattacaaatcagagctgagtggggaggtgcttcagcagcagcgggatcaatacgatttccactgggaagagacaggaattctacctacacataggaaggccaaggttgatccacttaaccttgttattgtaattttaaagctggtatcggtagctgggaagctttatgtgtgtgtatgtcagctcagcatcttttaatcgtgtctgattttactctcgttacttctcgctgttggaagcatctctgggtttcttgtggcgtctggtgtggaatggccttcctctctaggtgcctgaggtgtccgctgacgggtggcctctcacccccctctagagaaacctgacatttacaatggattgtatttgtccggcaaaaaaggcggattcattcatagagcagaaagaacctgttggcgtaaggtcttccactagttagatggtttcttttggggaaatgtttatatttggtaacttctagaaagccagaaaatggactctgatttcatagcattttgataaaatgccacaaaataagggctatagagagatttttacaagtcagattttttgttccccaaatcttttaaatgaagccagtgactcccagttctcaacacatggccccagtcaagacagaacaccatggaaaaaaccctgtaagtattatggcactctccgaatcctcctgaaggcatttcctctacagacatagtgttacaggaagtgaaatgcaaatgtgcaattttttttaaaggagcttttaaacaaagtaataataattggtgttgagaacatcagttgccttattctaagatttcataaggctgagtttgcacgcttggacttcagttctgctagcatgtaaagagtggtggactttaaaaccgtaagaggtatcattacaagtcacctggaacagactcaaagaacaggttctttgggcaacagacaaagaagaatcaagttctgtgctgtcccgtgagtgtgtctgagtaccattcactggagttgctgcttaggtctgggacgtgtgtgtgactcttaacaattgctgtctgaaaatgagagagaagacttcggaagcacattgtgttcataatgtactccacaatggccagtccaattgctatctatttttttatccagaggcttaattaaatgatgtggtaaaatgatgtttgagcattaagacaatgtaattctttatttctgggtggaaagatataccggattaaatttatctgtttaaaaaaatgacaaaagttatcaccaaaaccccctttcccatcttgcactgtttgttttggattgggtttgggggaaagagatgtttttcttagttgtctactttgtttgaacacttttgttgtggttcaagtgctgttttgtgtgttgggaccaaacagttgtcaataaactttacaagcgagcatct

SEQ ID NO: 424 - DNA, 3461 bp, Homo sapiens
ggaagatgcgaccggcagacggcattcgctgggaacgacggatagactgggggctgcggcctagaggtccgggcttggagttcgcctcagacgcggtggagccgccggagtctgagaaggtcttcaggcaccatggaggacaaacgcaacatccagatcatcgagtgggaacacctggacaagaagaagttctacgtgtttggtgtggcaatgacaatgatgatccgtgtcagtgtctacccattcaccctcatccgcacccggttgcaagttcagaaggggaagagcctctaccatgggaccttcgatgccttcatcaagatcctgcgagcagatggtatcactggcctctaccgagggttcctggtcaataccttcaccctcatctctggccagtgttatgtcaccacttatgagctcacccggaagtttgtagctgactacagccagagtaacacagtcaaatcactggtggctggtggctcagcctcccttgtggcccagagcatcacagtgcccattgatgtagtctcccagcacctgatgatgcaacgcaagggtgagaaaatgggccgctttcaggtgcgggggaacccagagggacaaggggtagttgcctttggccaaaccaaggacatcatcaggcagatcctgcaggctgatggacttcgcggcttctatcgaggctatgtggcttcactgcttacctatatcccaaacagtgctgtctggtggcccttctatcacttctatgcagccattgtctttccctggattccagagcagctctcctacctgtgtcctaaggagtgccctcacattgtctttcaagctgtctcggggcccctggctgcagccactgcctccatcctcaccaatcccatggatgtcatacgaacccgtgtgcaggttgagggcaagaactccatcatcctgaccttcagacagctgatggcagaagaagggccttggggcctcatgaagggcctctcggccagaatcatctcagccacaccttccaccattgtcattgtggtgggctatgagagcctcaagaaactcagcctccgacctgagctggtggactcgagacactggtaaccagtggtggggagagaagcctgctgttttccacactaccgtgggtcaggggcagagtggagaggacagcaccctctccaggtgctcccaccacacacccagccctgccctgggccaagtggcctaactgggatagggatagagactttgaactgctcttgctgaagaggctccacgcctggatcccttgcccccactatttaaaattctcttctgagctgggctccctcactcagtccctgtatttgatactggcctaaagaccccaccccccaccctgccagcccttcttctggcttccccttccatctgtgtccctgagaccctgagaagagctgtacatagagcttgcttactaccactggttcttcctcttgggctttcagcccagactccaagcagctgctatcaaccctctctcccttcatctcttagccttgcttatttttattttgggaccgagctgcccactagatgactctgcttttccctgcatttggggctaaggtgccaggtacttatttgcacagggagcaggagcagcaaaaaatctctggttctccagagcactcgtcctctctttggaggggttattaggttgggagaaatgttgatacttttgttttgtgtgtgtgtgtgtgtgtgtgtgtgtgtgtgtgtgtgtgttttaacatctgtgaaccaggctattagtcctgctaaagcgccaatcctgctgtcagagctcacccccttcctaagacaggtagaaaaatgtaatgtagctttttccacaagccagttccctgtcccttcagtctcaggagccctaggagagtctaagctggggcatcccctggcccagaggactcccgtggtgggcacagttctaagtggatcaggctgtcttgggtgcactggacttggagcactaccttgagaagtcaggttgagaaagtagttgatctagaaggcaacaagtgggcatgtgttccccagcacattacccaggccagcagagccaaacctaggagagggcagtgggtagattctctgccccaggcagccatgacatacacataaataccccaatcactcagacttacggcaacaagtgttgtctcactatggtgatctctaagatccacatcactggatgcgtagtcatcccagtcatggtaccctgtggaggaatgctggaagaacataaagagcagttcagaaagtcacccaataccaggaccactgcatttaccagcctgatactgccaagattatctgatgctctcctcaggagctaggagaggagtgctccttcctccctgccgctactctccccaagcctgtgttgcaggtagagaggtgcagcaaatagagaaggcatgtcaaaccctgcatttctacctgagacgtgtgacctggatgatcctccaaaccctattggtcccaccccctgggaaaggccatggtgccagtttgaaaggtgctagctacctgaagccttgatatttcttcatggctgccgcacattcttccaccttggccagaacaggttctgaaaaccgcttctctaccttcaccaccaccactgcccatcttgatctctttgagggttttcccatttcacttgatcttatttttgtttatcccttcctgcactttgtcaagagagtcctccagtttctatccaggaatgttcacatccaaagggttggacccacggatcattctgaatcttcctgcccctcctcactgcttaaccctgagaaccacaaatataatggaagcagttccccccaccctcaccccatctctttaagctcatcctagcaagacctctagagaccctagagactcgactttagtccttccccgccatggcacagtggggaaggtgtcaatggggagtgtcacggacaggaggtaggatcctgccgctcgcgtcttagtgtttctccctcaagactttccttctgttttgttgtcttgtgcagtattttacagcccctcttgtgtttttctttatttctcgtacacacacgcagttttaagggtgatgtgtgtataattaaaaggacccttggcccatactttcctaattctttagggactgggattgggtttgactgaaatatgttttggtggggatgggacggtggacttccattctccctaaactggagttttggtcggtaatcaaaactaaaagaaacctctgggagactggaaacctgattggagcactgaggaacaagggaatgaaaaggcagactctctgaacgtttgatgaaatggactcttgtgaaaattaacagtgaatattcactgttgcactgtacgaagtctctgaaatgtaattaaaagtttttattgagcccccg

SEQ ID NO: 425 - DNA, 7150 bp, Homo sapiens
cgagcacagtgtatctggccggagcagtgcttatggcgatgctacagctgaggggcatccggctggaccaggaagtgtcagctcaagcactggagccatcagcaccaccactgggcaccaggagggagatggctccgagggagaaggagaaggagaaactgaaggagatgtccacactagcaacaggctgcacatggtccgtctaatgctgttggagagattactgcagaccctgcctcaattacgaaacgttggcggtgtccgggccatcccatacatgcaggtcattctaatgctcactacagatctggatggagaagatgagaaagacaagggggccctagacaacctgctctcccagcttattgctgagttgggtatggataaaaaggatgtctccaagaagaatgagcgcagcgccctgaatgaagtccatctggtagtaatgagactcctgagtgtcttcatgtcccgcaccaaatctggatccaagtcttccatatgtgagtcatcttccctcatctccagtgccacagcagcagctctactgagctctggggctgtggactactgcctgcacgtgctcaaatcactgctggaatattggaagagccaacagaatgacgaggagcctgtggctaccagccagttgctgaaaccacatactacctcctccccacctgacatgagcccattctttctccgccagtatgtgaagggtcatgctgctgatgtgtttgaggcctatactcagcttctaacagaaatggtactgaggcttccttaccaaatcaaaaagattactgacaccaattctcgaatcccacctcctgtctttgaccactcgtggttttactttctctccgagtacctcatgatccagcagactccatttgtgcgccgtcaagtccgcaaacttctgctcttcatctgtggatccaaagagaagtaccgccagctccgggatttgcacaccctggactctcacgtgcgtgggatcaagaagctgctagaagagcaggggatattcctccgggcaagtgtggttacagccagctcaggctccgccttgcaatatgacacactcatcagcctgatggagcacctgaaagcctgtgcagagattgccgcccagcgaaccatcaactggcagaaattctgcatcaaagatgactccgtcctgtacttcctcctccaagtcagtttccttgtggatgagggcgtgtccccagtgctgctgcaactgctctcctgtgctctgtgcggcagcaaggtgctcgctgcactggcagcctcttcgggatcctccagtgcttcttcctcctcagcccctgtggctgccagttctggacaagccacaacacagtccaagtcttccactaaaaagagcaagaaagaagaaaaagaaaaggagaaagatggtgagacctctggcagccaggaggaccagctgtgcacagctctggtgaaccagctgaacaaatttgccgataaggaaaccctgatccagttcctgcgttgtttcctgttagagtccaattcttcctcggtgcgctggcaggcccactgtctgacactgcacatctacagaaattccagcaaatctcaacaggagctcctgctagatctgatgtggtccatctggccagaactcccagcctatggtcgtaaggctgcccagtttgtggacctactaggatatttctccctgaaaactccacaaacagagaagaagttgaaggagtattcacagaaggctgtggagattctgcggactcaaaaccatattcttaccaaccaccccaactcgaacatttataacactttgtctggcttagtggagtttgatggctattacctggagagcgatccctgcctggtgtgtaataacccggaagtaccgttctgttatatcaagctgtcttccattaaagtggacacgcggtacaccaccacccagcaggttgtgaagctcattggcagtcacaccatcagcaaagtgacagtgaaaatcggggatctgaaacggaccaagatggtgcggaccatcaacctgtattataacaaccgaaccgtgcaggccatcgtggagttgaaaaacaagccagctcgctggcacaaagccaagaaggttcagctgacccctggacagacagaggtgaagattgacctgccgttgcccattgtggcctccaatctgatgattgagtttgcagacttctatgaaaactaccaggcctccacagagaccctgcagtgccctcgctgtagtgcctcggtccctgccaacccaggagtctgtggcaactgtggagagaatgtgtaccagtgtcacaaatgcagatccatcaactacgatgaaaaggatcccttcctctgcaatgcctgtggcttctgtaaatatgcccgcttcgacttcatgctctatgccaagccttgctgtgcagtggatcccattgagaatgaagaagaccggaagaaggctgtatccaacatcaatacacttttggacaaagctgatcgagtgtatcatcagctgatgggacaccggccacagctggagaacctgctctgcaaagtgaatgaggcagctccagaaaagccacaggatgactcaggaacagcagggggcatcagctccacttctgccagtgtgaatcgttacatcctgcagttggctcaggagtattgtggagactgcaagaactcttttgatgaactctccaaaatcatccagaaagtctttgcttcgcgcaaagagttgttggaatatgacctacagcagagggaagcagccactaaatcatcccggacctccgtgcagcccacattcactgccagccagtaccgtgccttatccgtcctgggctgtggccacacatcctccaccaagtgctatggctgcgcctcggctgtcacagaacattgtatcacactacttcgggccctggccaccaacccagccttgaggcacatccttgtctcccagggccttatccgggagctctttgattataatcttcgccgaggggctgcggccatgcgggaggaggtccgccagctcatgtgcctcctaactcgagacaacccagaagccacccaacagatgaatgacctgattattggcaaggtctccacagccctgaagggccactgggccaaccccgatctggcaagtagcctgcagtatgaaatgctgctgctgacggattctatctccaaggaggacagctgctgggagctccggttacgctgtgctctcagccttttcctcatggctgtgaacattaagactcctgtggtggttgaaaacattaccctcatgtgcctgaggatcttgcagaagctgataaaaccacctgctcccactagcaagaagaacaaggatgtccccgttgaggccctcaccacggtgaagccatactgcaatgagatccatgcccaggctcaactgtggctcaagagagaccccaaggcatcctatgatgcctggaagaagtgtcttcctatcagagggatagatggcaatgggaaagcccccagcaaatcagagctccgccatctctatttgactgagaagtatgtgtggaggtggaaacagttcctgagtcgtcgggggaagaggacctcccccttggatctcaaactggggcataacaactggctgcgacaagtgcttttcactccagcaacgcaggccgcacggcaggcagcctgtaccattgtggaagctctagccaccattcccagccgcaagcagcaggtcctggacctgcttaccagttacctggatgagctgagcatagctggggagtgtgcagctgagtacctggctctctaccagaagctcatcacttctgcgcactggaaagtctacttggcagctcggggagtcctaccctatgtgggcaacctcatcaccaaggaaatagctcgtctgctggccctggaggaggctaccctgagtaccgatctgcagcagggttatgcccttaaaagtctcacaggccttctctcctcctttgttgaggtggaatccatcaaaagacattttaaaagtcgcttggtgggtactgtgctgaatggatacctgtgcttgcggaagctggtggtgcagaggaccaagctgatcgatgagacgcaggacatgctgctggagatgctggaggacatgaccacaggtacagaatcagaaaccaaggccttcatggctgtgtgcattgagacagccaagcgctacaatctggatgactaccggaccccggtgttcatcttcgagaggctctgcagcatcatttatcctgaggagaatgaagtcactgagttctttgtgaccctggagaaggatccccaacaagaagacttcttacagggcaggatgcctgggaacccgtatagcagcaatgagccaggcatcgggccgctgatgagggatataaagaacaagatttgccaggactgtgacttagtggccctcctggaagatgacagtggcatggagcttctagtgaacaataaaatcattagtttggaccttcctgtggctgaagtttacaagaaagtctggtgtaccacgaatgagggagagcccatgaggattgtttatcgtatgcgggggctgctgggcgatgccacagaggagttcattgagtccctggactctactacagatgaagaagaagatgaagaagaagtgtataaaatggctggtgtgatggcccagtgtgggggcctggaatgcatgcttaacagactcgcagggatcagagatttcaagcagggacgccaccttctaacagtgctactgaaattgttcagttactgcgtgaaggtgaaagtcaaccggcagcaactggtcaaactggaaatgaacaccttgaacgtcatgctggggaccctaaacctggcccttgtagctgaacaagaaagcaaggacagtgggggtgcagctgtggctgagcaggtgcttagcatcatggagatcattctagatgagtccaatgctgagcccctgagtgaggacaagggcaacctcctcctgacaggtgacaaggatcaactggtgatgctcttggaccagatcaacagcacctttgttcgctccaaccccagtgtgctccagggcctgcttcgcatcatcccgtacctttcctttggagaggtggagaaaatgcagatcttggtggagcgattcaaaccatactgcaactttgataaatatgatgaagatcacagtggtgatgataaagtcttcctggactgcttctgtaaaatagctgctggcatcaagaacaacagcaatgggcaccagctgaaggatctgattctccagaaggggatcacccagaatgcacttgactacatgaaaaagcacatccctagcgccaagaatttggatgccgacatctggaaaaagtttttgtctcgcccagccttgccatttatcctaaggctgcttcggggcctggccatccagcaccctggcacccaggttctgattggaactgattccatcccgaacctgcataagctggagcaggtgtccagtgatgagggcattgggaccttggcagagaacctgctggaagccctgcgggaacaccctgacgtaaacaagaagattgacgcagcccgcagggagacccgggcagagaagaagcgcatggccatggcaatgaggcagaaggccctgggcaccctgggcatgacgacaaatgaaaagggccaggtcgtgaccaagacagcactcctgaagcagatggaagagctgatcgaggagcctggcctcacgtgctgcatctgcagggagggatacaagttccagcccacaaaggtcctgggcatttataccttcacgaagcgggtagccttggaggagatggagaataagccccggaaacagcagggctacagcaccgtgtcccacttcaacattgtgcactacgactgccatctggctgccgtcaggttggctcgaggccgggaagagtgggagagtgccgccctgcagaatgccaacaccaagtgcaacgggctccttccggtctggggacctcatgtccctgaatcagcttttgccacttgcttggcaagacacaacacttacctccaggaatgtacaggccagcgggagcccacgtatcagctcaacatccatgacatcaaactgctcttcctgcgcttcgccatggagcagtcgttcagcgcagacactggcgggggcggccgggagagcaacatccacctgatcccgtacatcattcacactgtgctttacgtcctgaacacaacccgagcaacttcccgagaagagaagaacctccaaggctttctggaacagcccaaggagaagtgggtggagagtgcctttgaagtggacgggccctactatttcacagtcttggcccttcacatcctgccccctgagcagtggagagccacacgtgtggaaatcttgcggaggctgttggtgacctcgcaggctcgggcagtggctccaggtggagccaccaggctgacagataaggcagtgaaggactattccgcttaccgttcttcccttctcttttgggccctcgtcgatctcatttacaacatgtttaagaaggtgcctaccagtaacacagagggaggctggtcctgctctctcgctgagtacatccgccacaacgacatgcccatctacgaagctgccgacaaagccctgaaaaccttccaggaggagttcatgccagtggagaccttctcagagttcctcgatgtggccggtcttttatcagaaatcaccgatccagagagcttcctgaaggacctgttgaactcagtcccctgaccaccacacagcagctgcggcggcgaagacgaagctggcttgccttccaccctctgttctccctccttgtgcattaagttccctccgcgggatgctgcattgttaccccgccctcccctctctcatttttcttggtgtggcttggggtttttaggcttcctgttttatctcgtgtgtgtggtgcaccagctatgaggttgtctgtaacccaagccatcaaagggcctgtacatacctaggagccatgagttgtcccggccagcttcatacttgagtgtgcacatcttgagaaataaacaagtgacttaacacacattg

SEQ ID NO: 426 - DNA, 3601 bp, Homo sapiens
ccctggtgggagctccggcctccggtcaaggcctggccgggagcgccacgaattctcgcgtcgtctcgcgagagtccaagttaaagaacatggcgacgtctaatctgttaaagaataaaggttctcttcagtttgaagacaaatgggattttatgcgcccgattgttttgaagcttttacgccaggaatctgttacaaaacagcagtggtttgatctgttttcggatgtgcatgcagtctgtctttgggatgataaaggcccagcaaaaattcatcaggctttaaaagaagatattcttgagtttattaagcaggcacaggcacgagtactgagccatcaagatgatacggctttgctaaaagcatatattgttgaatggcgaaagttctttacacaatgtgatattttaccaaaacctttttgtcaactagagattactttaatgggtaaacagggcagcaataaaaaatcaaatgtggaagacagtattgttcgaaagcttatgcttgatacatggaatgagtcaatcttttcaaacataaaaaacagactccaagatagtgcaatgaagctggtacatgctgagagattgggagaagcttttgattctcagctggttattggagtaagagaatcctatgttaacctttgttctaatcctgaggataaacttcaaatttatagggacaattttgagaaggcatacttggattcaacagagagattttatagaacacaagcaccctcgtatttacaaccaaatggtgtacagaattatatgaaatatgcagatgctaaattaaaagaagaagaaaaacgagcactacgttatttagaaacaagacgagaatgtaactccgttgaagcactcatggaatgctgtgtaaatgccctggtgacatcatttaaagagactatcttagctgagtgccaaggcatgatcaagagaaatgaaactgaaaaattacatttaatgttttcattgatggacaaagttcctaatggtatagagccaatgttgaaagacttggaggaacatatcattagtgctggcctggcagatatggtagcagctgctgaaactattactactgactctgagaaatacgttgagcagttacttacactatttaatagatttagtaaactcgtcaaagaagcttttcaagatgatccacgatttcttactgcaagagataaggcgtataaagcagttgttaatgatgctaccatatttaaacttgaattacctttgaagcagaagggggtgggattaaaaactcagcctgaatcaaaatgccctgagctgcttgccaattactgtgacatgttgctaagaaaaacaccattaagcaaaaaactaacctctgaagagattgaagcaaagcttaaagaagtgctcttggtacttaagtatgtacagaacaaagatgtttttatgaggtatcataaagctcatttgacacgacgtcttatattagacatctctgccgatagtgaaattgaagaaaacatggtagagtggctaagagaagttggtatgccagcggattatgtaaacaagcttgctagaatgtttcaggacataaaagtatctgaagatttgaaccaagcttttaaggaaatgcacaaaaataataaattggcattaccagctgattcagttaatataaaaattctgaatgctggcgcctggtcaagaagttctgagaaagtctttgtctcacttcctactgaactggaggacttgataccggaagtagaagaattctacaaaaaaaatcatagtggtagaaaattacattggcatcatctcatgtcaaatggaattataacatttaagaatgaagttggtcaatatgatttggaggtaaccacgtttcagctcgctgtattgtttgcatggaaccaaagacccagagagaaaatcagctttgaaaatcttaagcttgcaactgaactccctgatgctgaacttaggaggactttatggtctttagtagctttcccaaaactcaaacggcaagtttttttgtatgaccctcaagtcaactcacccaaagactttacagaaggtaccctcttctcagtgaaccaggagttcagtttaataaaaaatgcaaaggttcagaaaaggggtaaaatcaacttgattggacgtttgcagctcactacagaaaggatgagagaagaagagaatgaaggaatagttcaactacgaatactaagaacccaggaagctatcatacaaataatgaaaatgagaaagaaaattagtaatgctcagctgcagactgaattagtagaaattttgaaaaacatgttcttgccacaaaagaaaatgataaaagagcaaatagagtggctaatagagcacaaatacatcagaagagatgaatctgatatcaacactttcatatatatggcataattttgaatatcatggacaatatttagaacccaaattttggagtgcttgggcagaaagttgtaaagtttgtgctgagagaaaggtttatttggactttgattacataaatattaccatctctgccttaccttacaaaaacaactatattttgccaatcacattagttagcatgatggcattcccttcatgttgcacactctttgacagcatgctgttttgtggagaaacttgcattcatgaagagcccattatcaacttttaaaagtgaatttgatttgtacccaccaggagaaatacagttgggaagggtgagggtggggttcttgttgcttttttctctttttttcctctcttaaaaaatgtacttgcacaaggaaggatcttcagatattcatgcactgaaaaatgctgttatcttttgtttttaaaaaatgcaattaaaactagaaatagcactcttggtttcttttgatgaaaagagtgagctggtcaatgcaacattgggaaacggcagatgtagataattcagcattggcgtatttgcttgtcccaatacaagaatgccaaaggaggaaacaggaaaaattgccgtccattttaaaaatttaggtttgttgttttaaaccataattgttctcagaacttttttggaacttcctaattttgggtcatttaatttaagaatgagagtcatgatgttttgatttatgaaggtgaatttaatgcaaaagtgggtaacactacattcatagcaaagttttttattaaattttataaatttttaatagccaattatgtcctaattgtattttggggaatgaacagcagcaaatactgtaaatgtacagttttcttttttttttttttggttatgtatacaaaagttttaactactttttggtgtttatgaaaatcatttagttgacaaggtgcctatgccattgttaaattttctttaagtaatttaacaacagatttgctaatttaaaaaaaaaatgaaaaaaaaaaccttaccaccattttgtaaaggtctgaaaccacattgggcaccctttatccaggtccctcccccccaacgtacacttaaaattggtgccgagcagggatataacctgcagttaagtgaaaagaaaaatccagcctccccctccaaaaaaaaaaaaaaaaaa

SEQ ID NO: 427 - DNA, 6135 bp, Homo sapiens
  misc_feature (1753)..(1852): n is a, c, g, or t
  misc_feature (1986)..(2085): n is a, c, g, or t
  misc_feature (2311)..(2410): n is a, c, g, or t
  misc_feature (2581)..(2680): n is a, c, g, or t
  misc_feature (2835)..(2934): n is a, c, g, or t
  misc_feature (3064)..(3163): n is a, c, g, or t
acatggtgcgtgataacttgcccttgatttgggttcatttgaagagcgtagaactctaacaaataaacagccttttgggacctgtccccggacgaggactgcccccctccctcgggcaactactactgatgctgtccaggcatcgcccaaggggaaaggttgcagcggggtcggaaggcgcgggaggagtctggcggtgattgatgggaagggatgaatgaataaaagtacttgtctgatggcagcagagaccccgagcaaacggtggaggctacactgtctggcattctcgcagcgtttcgtcagagccggacccgcctgcagctcaagggaggcgtgctcctctcccagagcaggctggaacccagctgggttccgcctcccgggaaggtggtctccattcgtcgctctgcatctggtttgtcagatccgagaggtaaacattcgggcttggtgttgaattaaaatcattgattgaaccttattctggggcttcggtttggcttactagtttgggattttaaaaaaataaaaattaagcctatagagagggcaaattaaaattaggttgggtaaaggaaggagcgcgagtgtttgaagccgtttggagggaacagcggtttccaagttcctgctgacttgagaagtctctgcgggtttccgaatctccggcgcactcctgggcgcgctgcgggagctgtagctcagccagccagggagtagcggctttcatccgccgggaggagtctttcgagttcaatcgcggggtatagaggttcccctgcggggcaaaatgcagagcttgacacaagcccttggcctctaggtgccttaattccgcggttcccacgcacgcttaactaagacgtgtctgtattcctcccgttacgtgaaagagttcggagctttgcctgggacccccatcattccctccctggcacaccccttccagaacgccccgccccactgcatattatttacccctcctggccacgcgggggaagaaaaacagctgagagggcatcaggaaggagtttcgacccgcgctggcgagtcatgagcgccaagtttcccactggcgcgcaaacttgagttacttttgagcgtggatactggcgaagaggctgcgggcggtattagcgtttgcagcgacttggctcgggcagctgacccaagtgtcctgtcttccttcctctgcttgtctctaggctctgaaactgcggagcggccaccggacgccttctggagcaggtagcagcatgcagccgcctccaagtctgtgcggacgcgccctggttgcgctggttcttgcctgcggcctgtcgcggatctggggagaggagagaggcttcccgcctgacagggccactccgcttttgcaaaccgcagagataatgacgccacccactaagaccttatggcccaagggttccaacgccagtctggcgcggtcgttggcacctgcggaggtgcctaaaggagacaggacggcaggatctccgccacgcaccatctcccctcccccgtgccaaggacccatcgagatcaaggagactttcaaatacatcaacacggttgtgtcctgccttgtgttcgtgctggggatcatcgggaactccacacttctgagaattatctacaagaacaagtgcatgcgaaacggtcccaatatcttgatcgccagcttggctctgggagacctgctgcacatcgtcattgacatccctatcaatgtctacaaggtaaagggcgnnnnnnnnnnnnnnnnnnnnnnnnnnnnnnnnnnnnnnnnnnnnnnnnnnnnnnnnnnnnnnnnnnnnnnnnnnnnnnnnnnnnnnnnnnnnnnnnnnnnctcaatgcagctgctggcagaggactggccatttggagctgagatgtgtaagctggtgcctttcatacagaaagcctccgtgggaatcactgtgctgagtctatgtgctctgagtattgacaggtagaagcttnnnnnnnnnnnnnnnnnnnnnnnnnnnnnnnnnnnnnnnnnnnnnnnnnnnnnnnnnnnnnnnnnnnnnnnnnnnnnnnnnnnnnnnnnnnnnnnnnnnnttatcttcagatatcgagctgttgcttcttggagtagaattaaaggaattggggttccaaaatggacagcagtagaaattgttttgatttgggtggtctctgtggttctggctgtccctgaagccataggttttgatataattacgatggactacaaaggaagttatctgcgaatctgcttgcttcatcccgttcagaagacagctttcatgcaggtaaatttcannnnnnnnnnnnnnnnnnnnnnnnnnnnnnnnnnnnnnnnnnnnnnnnnnnnnnnnnnnnnnnnnnnnnnnnnnnnnnnnnnnnnnnnnnnnnnnnnnnnatccctatagttttacaagacagcaaaagattggtggctgttcagtttctatttctgcttgccattggccatcactgcatttttttatacactaatgacctgtgaaatgttgagaaagaaaagtggcatgcagattgctttaaatgatcacctaaagcaggtaagaaaatnnnnnnnnnnnnnnnnnnnnnnnnnnnnnnnnnnnnnnnnnnnnnnnnnnnnnnnnnnnnnnnnnnnnnnnnnnnnnnnnnnnnnnnnnnnnnnnnnnnntttatttcagagacgggaagtggccaaaaccgtcttttgcctggtccttgtctttgccctctgctggcttccccttcacctcagcaggattctgaagctcactctttataatcagaatgatcccaatagatgtgaacttttgaggtaagaaaggnnnnnnnnnnnnnnnnnnnnnnnnnnnnnnnnnnnnnnnnnnnnnnnnnnnnnnnnnnnnnnnnnnnnnnnnnnnnnnnnnnnnnnnnnnnnnnnnnnnntttgttgcagctttctgttggtattggactatattggtatcaacatggcttcactgaattcctgcattaacccaattgctctgtatttggtgagcaaaagattcaaaaactgctttaaggtaagagactnnnnnnnnnnnnnnnnnnnnnnnnnnnnnnnnnnnnnnnnnnnnnnnnnnnnnnnnnnnnnnnnnnnnnnnnnnnnnnnnnnnnnnnnnnnnnnnnnnnnttttgtacagtcatgcttatgctgctggtgccagtcatttgaagaaaaacagtccttggaggaaaagcagtcgtgcttaaagttcaaagctaatgatcacggatatgacaacttccgttccagtaataaatacagctcatcttgaaagaagaactattcactgtatttcattttctttatattggaccgaagtcattaaaacaaaatgaaacatttgccaaaacaaaacaaaaaactatgtatttgcacagcacactattaaaatattaagtgtaattattttaacactcacagctacatatgacattttatgagctgtttacggcatggaaagaaaatcagtgggaattaagaaagcctcgtcgtgaaagcacttaattttttacagttagcacttcaacatagctcttaacaacttccaggatattcacacaacacttaggcttaaaaatgagctcactcagaatttctattctttctaaaaagagatttatttttaaatcaatgggactctgatataaaggaagaataagtcactgtaaaacagaacttttaaatgaagcttaaattactcaatttaaaattttaaaatcctttaaaacaacttttcaattaatattatcacactattatcagattgtaattagatgcaaatgagagagcagtttagttgttgcatttttcggacactggaaacatttaaatgatcaggagggagtaacagaaagagcaaggctgtttttgaaaatcattacactttcactagaagcccaaacctcagcattctgcaatatgtaaccaacatgtcacaaacaagcagcatgtaacagactggcacatgtgccagctgaatttaaaatataatacttttaaaaagaaaattattacatcctttacattcagttaagatcaaacctcacaaagagaaatagaatgtttgaaaggctatcccaaaagacttttttgaatctgtcattcacataccctgtgaagacaatactatctacaattttttcaggattattaaaatcttcttttttcactatcgtagcttaaactctgtttggttttgtcatctgtaaatacttacctacatacactgcatgtagatgattaaatgagggcaggccctgtgctcatagctttacgatggagagatgccagtgacctcataataaagactgtgaactgcctggtgcagtgtccacatgacaaaggggcaggtagcaccctctctcacccatgctgtggttaaaatggtttctagcatatgtataatgctatagttaaaatactatttttcaaaatcatacagattagtacatttaacagctacctgtaaagcttattactaatttttgtattatttttgtaaatagccaatagaaaagtttgcttgacatggtgcttttctttcatctagaggcaaaactgctttttgagaccgtaagaacctcttagctttgtgcgttcctgcctaatttttatatcttctaagcaaagtgccttaggatagcttgggatgagatgtgtgtgaaagtatgtacaagagaaaacggaagagagaggaaatgaggtggggttggaggaaacccatggggacagattcccattcttagcctaacgttcgtcattgcctcgtcacatcaatgcaaaaggtcctgattttgttccagcaaaacacagtgcaatgttctcagagtgactttcgaaataaattgggcccaagagctttaactcggtcttaaaatatgcccaaatttttactttgtttttcttttaataggctgggccacatgttggaaataagctagtaatgttgttttctgtcaatattgaatgtgatggtacagtaaaccaaaacccaacaatgtggccagaaagaaagagcaataataattaattcacacaccatatggattctatttataaatcacccacaaacttgttctttaatttcatcccaatcactttttcagaggcctgttatcatagaagtcattttagactctcaattttaaattaattttgaatcactaatattttcacagtttattaatatatttaatttctatttaaattttagattatttttattaccatgtactgaatttttacatcctgataccctttccttctccatgtcagtatcatgttctctaattatcttgccaaattttgaaactacacacaaaaagcatacttgcattatttataataaaattgcattcagtggctttttaaaaaaaatgtttgattcaaaactttaacatactgataagtaagaaacaattataatttctttacatactcaaaaccaagatagaaaaaggtgctatcgttcaacttcaaaacatgtttcctagtattaaggactttaatatagcaacagacaaaattattgttaacatggatgttacagctcaaaagatttataaaagattttaacctattttctcccttattatccactgctaatgtggatgtatgttcaaacaccttttagtattgatagcttacatatggccaaaggaatacagtttatagcaaaacatgggtatgctgtagctaactttataaaagtgtaatataacaatgtaaaaaattatatatctgggaggattttttggttgcctaaagtggctatagttactgattttttattatgtaagcaaaaccaataaaaatttaagtttttttaacaactaccttatttttcactgtacagacactaattcattaaatactaattgattgtttaaaagaaatataaatgtgacaagtggacattatttatgttaaatatacaattatcaagcaagtatgaagttattcaattaaaatgccacatttctggtctctgggctggactgtgtgtttcattgttgtgaagaaacagatatacagacatgcaacttcccaaggttgattttccgggtaatagtttccaatggcctctttggtcttccttt

SEQ ID NO: 428 - DNA, 1109 bp, Homo sapiens
gcggggcctgaggcggagaccggagagcccgcggcccggccggaggcagctcgggacaggcttgagcggcggggcgcgctgcccggccggcggggatgcgggaccggctgccagacctgacggcgtgtaggaagaatgatgatggagacacagttgttgtggttgagaaagatcatttcatggatgatttcttccatcaggtggaggagattagaaacagtattgataaaataactcaatatgttgaagaagtaaagaaaaaccacagcatcattctttctgcaccaaacccggaaggaaaaataaaagaagagcttgaagatctgaacaaagaaatcaagaaaactgcgaataaaattgcagccaagttaaaggctattgaacaaagttttgatcaggatgagagtgggaaccggacttcagtggatcttcggatacgaagaacccagcattcggtgctgtctcggaagtttgtggaagccatggcggagtacaatgaggcacagactctgtttcgggagcggagcaaaggccgcatccagcgccagctggagataactgggagaaccaccacagacgacgagctagaagagatgctggagagcgggaagccatccatcttcacttccgacattatatcagattcacaaattactagacaagctctcaatgaaatcgagtcacgtcacaaggacatcatgaagctggagaccagcatccgagagttgcatgagatgttcatggacatggctatgtttgtggagactcagggtgaaatgatcaacaacatagaaagaaatgttatgaatgccacagactatgtagaacacgctaaagaagaaacaaaaaaagctatcaaatatcagagcaaggcaagaaggaaaaagtggataattattgctgtgtcagtggttctggttgtctatcgtctatttggcttgtcgttggaatatgttgtacgcagtgctgcctctctgccagggtggggaaattgatgttcattatattgaagtttgtttattgattctcacacatcaaaccaccaagattcctgctgcaatgaaccaaatcagcatcctgtcatttcgtgaatgaatctcagacgctgt

SEQ ID NO: 429 - DNA, 9517 bp, Homo sapiens
gttgctgtcggagagagaaagccgcacccgagaggaggtgtgggtgttccgcttccatcctaacggaacgagctccctcttcgcggacatgggattacccagcggctgctaacccctctcctcgccctgctcccccaaaccggcgtggctccccgggcaccaaggagctgactacagaggagcaggatttgcacccctcgctgggcttgctttggcaacagagtgcctgacccaggtcaggattttcaagaaagacatgtctgacaaaatgtctagcttcctacatattggagacatttgttctctgtacgcggagggatcgacaaatggatttattagcaccttgggcctggttgatgatcgttgtgttgtacagccagaaaccggggaccttaacaatccacctaagaaattcagagactgcctctttaagctatgtcccatgaaccgctactctgcccaaaagcagttctggaaagccgctaagcctggggccaacagcaccacagacgcagtgctactcaacaaactgcaccacgctgcagacttggaaaagaagcagaatgagacagaaaacaggaaattgctggggaccgtaatccagtatggcaatgtgatccagctcctgcatttgaaaagtaataaatacctaacagtgaataagaggcttcctgctctgttggagaagaatgccatgagagtcacattggacgaggctggaaatgaagggtcctggttttatattcagccattctacaagctgcgatccattggagacagcgtggtcataggtgacaaggtggttctgaaccccgtcaatgctggtcagcccctacatgctagcagccatcaactggtagataacccaggctgcaatgaggtcaattccgtcaactgcaatacaagctggaaaatagtccttttcatgaaatggagtgataacaaagacgacatattaaaggggggtgacgtggtgaggctgtttcatgctgagcaggagaagtttctcacctgtgacgaacacaggaagaagcagcacgtcttcctgagaaccacgggccggcagtcggccacatctgccaccagttcaaaagccctgtgggaggtggaggtggtccagcatgacccatgtcggggcggagcagggtattggaacagccttttccgtttcaagcatctggccacggggcattacttggcagcagaggtggaccctgatcaggacgcctctcgaagtaggttgcggaatgcccaagaaaagatggtatactccctggtctctgtgcctgaaggcaatgacatctcctccattttcgagctagatcccaccactctgcgtggaggtgacagccttgtcccaaggaactcttatgttcggctcagacacctatgtactaatacctgggttcacagcacaaatattcctattgacaaggaagaagaaaagcccgtgatgctgaaaattggcacctctcctgtgaaggaggataaggaagcatttgccatagttccggtttctcctgctgaagttcgggacctggactttgccaatgatgccagcaaggtgctgggctccattgctgggaagctagagaagggcaccatcacccagaatgaaaggaggtctgtaaccaagctgctagaagatttggtttacttcgtcactggtggaactaattctggtcaagatgttctcgaagttgtcttctccaagcccaacagagaacggcagaaactgatgagagaacagaatattctcaagcagatcttcaagttgttacaagccccattcacagactgcggtgatggcccaatgcttcggctggaagagctcggggaccagcggcacgctcctttcagacacatctgccggctctgctacagggtgctgagacactcgcagcaagactacaggaagaaccaggagtatatagccaagcagtttggcttcatgcagaagcagattggctatgatgtgttggctgaagacactatcactgccctgctccacaataatcggaaactcctggaaaaacacattaccgcggcagagattgacacatttgtcagcctggtgcgaaagaacagggagcccagattcttagattacctctccgacctctgtgtctccatgaacaaatcaattccagtgacccaggaactgatatgtaaagctgtgctgaaccccaccaacgctgacatcctgattgagaccaaattggttctttctcgttttgaatttgaaggtgtctcttccactggagagaatgctctggaggcaggagaagacgaggaagaggtgtggctgttttggagggacagcaacaaagagattcgcagcaagagtgtgagggaattggctcaggatgctaaagaagggcagaaggaggaccgagacgttctcagctactacagatatcagctgaacctctttgcgaggatgtgtctggaccgccaatacctggccatcaacgaaatctcaggccagctggatgtcgatctcattctccgctgcatgtctgacgagaacctgccctatgacctcagggcgtccttctgccgcctcatgcttcacatgcatgtggaccgagatccccaggaacaagtcacccccgtgaaatatgcccgcctctggtcggagattccctcggagatcgccattgacgactatgatagtagtggagcttccaaagatgaaattaaggagagatttgctcagaccatggagtttgtggaggagtatttaagagatgtggtttgtcagaggttccctttctctgataaagagaagaataagcttacgtttgaggttgtaaatttagctaggaatctcatatactttggtttctacaacttctctgaccttctccgattaactaagatccttctggccatattggactgtgtacatgtgacaacaatcttccccattagcaagatggcgaaaggagaagagaataaaggcagtaacgtgatgagatctattcatggcgtgggagagctgatgacccaggtggtgctccggggaggaggctttttgcccatgactcccatggctgctgcccctgaaggcaatgtgaagcaggcagagcctgagaaggaggacatcatggtcatggacaccaagctgaagatcattgagatactccagtttattttgaatgtgaggttggattataggatctcctgcctcctgtgtatatttaagcgagagtttgatgaaagcaattcccagacttcagaaacatcctccggaaacagcagccaagaagggccaagtaatgtaccaggtgctcttgactttgaacacattgaagaacaagcagaaggcatctttggaggaagtgaggagaacaccccactggacttggatgaccacggcggcagaacctttctccgtgtcctgctccacttgacgatgcatgactacccacccctggtgtcaggggccctgcagctcctcttccggcacttcagccagaggcaggaggtgctccaggccttcaaacaggttcaactgctggttaccagccaagatgtggacaactacaaacagatcaaacaagacttggatcaactgaggtccatcgtggaaaagtcagagctttgggtgtacaaagggcagggccccgatgagactatggatggtgcatctggagaaaatgaacataagaaaacggaggagggaaataacaagccacaaaagcatgaaagcaccagcagctacaactacagagtggtcaaagagattttgattcggcttagcaaactctgtgttcaagagagtgcctcagtgagaaagagcaggaagcagcaacagcgtctgctccggaacatgggcgcgcacgccgtggtgctggagctgctgcagattccctatgagaaggccgaagataccaagatgcaagagataatgaggttggctcatgaatttttgcagaatttctgcgcaggcaaccagcagaatcaagctttgctacataaacacataaacctgtttctcaacccagggatcctggaggcagtaaccatgcagcacatcttcatgaacaatttccagctttgcagtgagatcaacgagagagttgttcagcacttcgttcactgcatagagactcacggtcggaatgtccagtatataaagttcttacagacaattgtcaaggcagaagggaaatttattaaaaaatgccaagacatggttatggccgagctggtcaattcgggagaggatgtcctcgtgttctacaacgacagagcctctttccagactctgatccagatgatgcggtcagaacgggatcggatggatgagaacagccctctcatgtaccacatccacttggtcgagctcctggctgtgtgcacggagggtaagaatgtctacacagagatcaagtgcaactccctgctcccgctggatgacatcgttcgcgtggtgacccacgaggactgcatccctgaggttaaaattgcatacattaacttcctgaatcactgctatgtggatacagaggtggaaatgaaggagatttataccagcaatcacatgtggaaattgtttgagaatttccttgtagacatctgcagggcctgtaacaacactagtgacaggaaacatgcagactcgattttggagaagtatgtcaccgaaatcgtcatgagtattgttactactttcttcagctctcccttctcagaccagagtacgactttgcagactcgccagcctgtctttgtgcaactgctgcaaggcgtgttcagggtttaccactgcaactggttaatgccaagccaaaaagcctccgtggagagctgtattcgggtgctgtctgatgtagccaagagccgggccattgccattcccgtggacctggacagccaagtcaacaacctctttctcaagtcccacagcattgtgcagaaaacagccatgaactggcggctctcagcccgcaatgccgcacgcagggactctgttctggcagcttccagagactaccggaatatcattgagagattgcaggacatcgtctccgcgctggaggaccgtctcaggcccctggtgcaggcagagttatctgtgctcgtggatgttctccacagacccgagctgcttttcccagagaacacagacgccagaaggaaatgtgaaagtggcggtttcatttgcaagttaataaagcatacaaaacagctgctagaagaaaatgaagagaagctctgcattaaggtcctacagaccctgagggaaatgatgaccaaagatagaggctatggagaaaagggtgaggcgctcaggcaagttctggtcaaccgttactatggaaacgtcagaccttcgggacgaagagagagccttaccagctttggcaatggcccactgtcagcaggaggacccggcaagcccgggggaggagggggaggttccggatccagctctatgagcaggggtgagatgagtctggccgaggttcagtgtcaccttgacaaggagggggcttccaatctagttatcgacctcatcatgaacgcatccagtgaccgagtgttccatgaaagcattctcctggccattgcccttctggaaggaggcaacaccaccatccagcactcctttttctgtcgcttgacagaagataagaagtcagagaaattctttaaggtgttttatgaccggatgaaggtggcccagcaagaaatcaaagcaacagtgacagtgaacaccagtgacttgggaaataaaaagaaagacgatgaggtagacagggatgccccatcacggaaaaaagctaaagagcccacaacacagataacagaagaggtccgggatcagctcctggaggcctccgctgccaccaggaaagccttcaccactttcaggagggaggctgatcccgacgaccactaccagcctggagagggcacccaggccactgccgacaaggccaaggacgacctggagatgagcgcggtcatcaccatcatgcagcccatcctccgcttccttcagctcctgtgtgaaaaccacaaccgagacctgcagaacttcctccgttgccaaaataacaagaccaactacaatttggtatgtgagaccctgcagtttctggactgtatttgtggaagcacaactggaggccttggtcttctgggcttgtatataaatgaaaagaacgtagcgcttatcaaccaaaccctggaaagtctgaccgaatactgtcaaggaccttgccatgagaaccagaactgcatagccacccatgaatccaatggcattgacatcatcacagccctgatcctcaatgatatcaatcctttgggaaagaagaggatggaccttgtgttagaactgaagaacaatgcctcgaagttgctcctggccatcatggaaagcaggcacgacagtgaaaacgcagagaggatactttataacatgaggcccaaggaactggtggaagtgatcaagaaagcctacatgcaaggtgaagtggaatttgaggatggagaaaacggtgaggatggggcggcgtcccccaggaacgtggggcacaacatctacatattagcccatcagttggctcggcataacaaagaacttcagagcatgctgaaacctggtggccaagtggacggagatgaagccctggagttttatgccaagcacacggcgcagatagagattgtcagattagaccgaacaatggaacagatagtctttcccgtgcccagcatatgtgaattcctaaccaaggagtcaaaactacgaatttactatactacagagagagacgaacaaggcagcaaaatcaatgatttctttctgcggtctgaagacctcttcaatgaaatgaattggcagaagaaactgagagcccagcccgtgttgtactggtgtgcccgcaacatgtctttctggagcagcatttcgtttaacctggccgtcctgatgaacctgctggtggcgtttttctacccgtttaagggagtccgaggaggaaccctggagccccactggtcgggactcctgtggacagccatgctcatctctctggccatcgtcattgccctccccaagccccatggcatccgggccttaattgcctccacaattctacgactgatattttcagtcgggttacaacccacgttgtttcttctgggcgctttcaatgtatgcaataaaatcatctttctaatgagctttgtgggcaactgtgggacattcacaagaggctaccgagccatggttctggatgttgagttcctctatcatttgttgtatctggtgatctgtgccatggggctctttgtccatgaattcttctacagtctgctgctttttgatttagtgtacagagaagagactttgcttaatgtcattaaaagtgtcactcgcaatggacggtccatcatcctgacagcagttctggctctgatcctcgtttacctgttctcaatagtgggctatcttttcttcaaggatgactttatcttggaagtagataggctgcccaatgaaacagctgttccagaaaccggcgagagtttggcaagcgagttcctgttctccgatgtgtgtagggtggagagtggggagaactgctcctctcctgcacccagagaagagctggtccctgcagaagagacggaacaggataaagagcacacatgtgagacgctgctgatgtgcattgtcaccgtgctgagtcacgggctgcggagcgggggtggagtaggagatgtactcaggaaaccgtccaaagaggaacccctgtttgctgctagagttatttatgacctcttgttcttcttcatggtcatcatcattgttcttaacctgatttttggggttatcattgacacttttgctgacctgaggagtgagaagcagaagaaggaagagatcttgaagaccacgtgctttatctgtggcttggaaagagacaagtttgacaacaagactgtcacctttgaagagcacatcaaggaagaacacaacatgtggcactatctgtgcttcatcgtcctggtgaaagtaaaggactccaccgaatatactgggcctgagagttacgtggcagaaatgatcaaggaaagaaaccttgactggttccccaggatgagagccatgtcattggtcagcagtgattctgaaggagaacagaatgagctgagaaacctgcaggagaagctggagtccaccatgaaacttgtcacgaacctttctggccagctgtcggaattaaaggatcagatgacagaacaaaggaagcagaaacaaagaattggtcttctaggacatcctcctcacatgaatgtcaacccacaacaaccagcataagcaaatgaaagaaaggaattgtatttaccttttataattattattagtgtgggtatggctaatgagttctgattcacccacgaaggttacatttatgctgaatacatttgtaaatactcagttttatactgtatgtatatgattgctactctaaaggtttggatatatgtattgtaattagaattgttggcatgatgacatttcatttgtgccaaaaatattaaaaatgccttttttggaaggactaacagaaagcacctgatttgcacttgaaccagattatagatttaaaagtatatgacatgtattttgtatttaaaactagaatagccagtatttatgttttttataaaactgtgcaatacgaattatgcaatcacaatacatttgtagctcccgagtgtcctaaagggagtgcacttctttgaagctggtgtgttaatactatgtaataaatggttaactttcaaatgatgctgctgccaaaattatattaatagtgagtttcaggcccctgggcattttgtaccatgtaattatcctctggtgatgctgtttctcgttagtggcagtagtgcctccgtctcctagtgataatgctccaagtctatgaactgttaaatcagcattcattttaagaaaagcaactttagtttcaaagatacttttaagcttctaaattgatcatttaaactatttctttaaataagagagccaaattagaggctcatactttagcttgtgaagaagataatgaattttttaaagggaactttctatgcaatgttcaggataaatcgatactgctggccaatcagtgtcatctcctgggtaaattttgatgtcgcattataaagacatgcataattgatggtttctagattatctagtccaaacaatagagtttattttttcttcatctgaaccaacatgctacagtagctaagaagtattaaaactatatacatccatataaagatgaaatatgaactatctcattagaagtcatagttgaccacagacatgttattcttctgaaagagccacattttggttttatttcttgtcacatgatttcttttcttgatggatgaaaaatatgaaatgaaatcttttatatctgttgcctagttttgtacatggatctcattttacaagagaatctctctgcta

SEQ ID NO: 430 - DNA, 5570 bp, Homo sapiens
ggcccctcagccctgctgcccagcacgagcctgtgctcgccctgcccaacgcagacagccagacccagggcggcccctctggcggctctgctcctcccgaaggatgcttggggagtgaggcgaagctgggcgctcctctcccctacagcagcccccttcctccatccctctgttctcctgagccttcaggagcctgcaccagtcctgcctgtccttctactcagctgttacccactctgggaccagcagtctttctgataactgggagagggcagtaaggaggacttcctggagggggtgactgtccagagcctggaactgtgcccacaccagaagccatcagcagcaaggacaccatgcggcttccgggtgcgatgccagctctggccctcaaaggcgagctgctgttgctgtctctcctgttacttctggaaccacagatctctcagggcctggtcgtcacacccccggggccagagcttgtcctcaatgtctccagcaccttcgttctgacctgctcgggttcagctccggtggtgtgggaacggatgtcccaggagcccccacaggaaatggccaaggcccaggatggcaccttctccagcgtgctcacactgaccaacctcactgggctagacacgggagaatacttttgcacccacaatgactcccgtggactggagaccgatgagcggaaacggctctacatctttgtgccagatcccaccgtgggcttcctccctaatgatgccgaggaactattcatctttctcacggaaataactgagatcaccattccatgccgagtaacagacccacagctggtggtgacactgcacgagaagaaaggggacgttgcactgcctgtcccctatgatcaccaacgtggcttttctggtatctttgaggacagaagctacatctgcaaaaccaccattggggacagggaggtggattctgatgcctactatgtctacagactccaggtgtcatccatcaacgtctctgtgaacgcagtgcagactgtggtccgccagggtgagaacatcaccctcatgtgcattgtgatcgggaatgaggtggtcaacttcgagtggacatacccccgcaaagaaagtgggcggctggtggagccggtgactgacttcctcttggatatgccttaccacatccgctccatcctgcacatccccagtgccgagttagaagactcggggacctacacctgcaatgtgacggagagtgtgaatgaccatcaggatgaaaaggccatcaacatcaccgtggttgagagcggctacgtgcggctcctgggagaggtgggcacactacaatttgctgagctgcatcggagccggacactgcaggtagtgttcgaggcctacccaccgcccactgtcctgtggttcaaagacaaccgcaccctgggcgactccagcgctggcgaaatcgccctgtccacgcgcaacgtgtcggagacccggtatgtgtcagagctgacactggttcgcgtgaaggtggcagaggctggccactacaccatgcgggccttccatgaggatgctgaggtccagctctccttccagctacagatcaatgtccctgtccgagtgctggagctaagtgagagccaccctgacagtggggaacagacagtccgctgtcgtggccggggcatgccccagccgaacatcatctggtctgcctgcagagacctcaaaaggtgtccacgtgagctgccgcccacgctgctggggaacagttccgaagaggagagccagctggagactaacgtgacgtactgggaggaggagcaggagtttgaggtggtgagcacactgcgtctgcagcacgtggatcggccactgtcggtgcgctgcacgctgcgcaacgctgtgggccaggacacgcaggaggtcatcgtggtgccacactccttgccctttaaggtggtggtgatctcagccatcctggccctggtggtgctcaccatcatctcccttatcatcctcatcatgctttggcagaagaagccacgttacgagatccgatggaaggtgattgagtctgtgagctctgacggccatgagtacatctacgtggaccccatgcagctgccctatgactccacgtgggagctgccgcgggaccagcttgtgctgggacgcaccctcggctctggggcctttgggcaggtggtggaggccacggctcatggcctgagccattctcaggccacgatgaaagtggccgtcaagatgcttaaatccacagcccgcagcagtgagaagcaagcccttatgtcggagctgaagatcatgagtcaccttgggccccacctgaacgtggtcaacctgttgggggcctgcaccaaaggaggacccatctatatcatcactgagtactgccgctacggagacctggtggactacctgcaccgcaacaaacacaccttcctgcagcaccactccgacaagcgccgcccgcccagcgcggagctctacagcaatgctctgcccgttgggctccccctgcccagccatgtgtccttgaccggggagagcgacggtggctacatggacatgagcaaggacgagtcggtggactatgtgcccatgctggacatgaaaggagacgtcaaatatgcagacatcgagtcctccaactacatggccccttacgataactacgttccctctgcccctgagaggacctgccgagcaactttgatcaacgagtctccagtgctaagctacatggacctcgtgggcttcagctaccaggtggccaatggcatggagtttctggcctccaagaactgcgtccacagagacctggcggctaggaacgtgctcatctgtgaaggcaagctggtcaagatctgtgactttggcctggctcgagacatcatgcgggactcgaattacatctccaaaggcagcacctttttgcctttaaagtggatggctccggagagcatcttcaacagcctctacaccaccctgagcgacgtgtggtccttcgggatcctgctctgggagatcttcaccttgggtggcaccccttacccagagctgcccatgaacgagcagttctacaatgccatcaaacggggttaccgcatggcccagcctgcccatgcctccgacgagatctatgagatcatgcagaagtgctgggaagagaagtttgagattcggccccccttctcccagctggtgctgcttctcgagagactgttgggcgaaggttacaaaaagaagtaccagcaggtggatgaggagtttctgaggagtgaccacccagccatccttcggtcccaggcccgcttgcctgggttccatggcctccgatctcccctggacaccagctccgtcctctatactgccgtgcagcccaatgagggtgacaacgactatatcatccccctgcctgaccccaaacccgaggttgctgacgagggcccactggagggttcccccagcctagccagctccaccctgaatgaagtcaacacctcctcaaccatctcctgtgacagccccctggagccccaggacgaaccagagccagagccccagcttgagctccaggtggagccggagccagagctggaacagttgccggattcggggtgccctgcgcctcgggcggaagcagaggatagcttcctgtagggggctggcccctaccctgccctgcctgaagctccccccctgccagcacccagcatctcctggcctggcctgaccgggcttcctgtcagccaggctgcccttatcagctgtccccttctggaagctttctgctcctgacgtgttgtgccccaaaccctggggctggcttaggaggcaagaaaactgcaggggccgtgaccagccctctgcctccagggaggccaactgactctgagccagggttcccccagggaactcagttttcccatatgtaagatgggaaagttaggcttgatgacccagaatctaggattctctccctggctgacaggtggggagaccgaatccctccctgggaagattcttggagttactgaggtggtaaattaacttttttctgttcagccagctacccctcaaggaatcatagctctctcctcgcactttttatccacccaggagctagggaagagaccctagcctccctggctgctggctgagctagggcctagccttgagcagtgttgcctcatccagaagaaagccagtctcctccctatgatgccagtccctgcgttccctggcccgagctggtctggggccattaggcagcctaattaatgctggaggctgagccaagtacaggacacccccagcctgcagcccttgcccagggcacttggagcacacgcagccatagcaagtgcctgtgtccctgtccttcaggcccatcagtcctggggctttttctttatcaccctcagtcttaatccatccaccagagtctagaaggccagacgggccccgcatctgtgatgagaatgtaaatgtgccagtgtggagtggccacgtgtgtgtgccagtatatggccctggctctgcattggacctgctatgaggctttggaggaatccctcaccctctctgggcctcagtttccccttcaaaaaatgaataagtcggacttattaactctgagtgccttgccagcactaacattctagagtattccaggtggttgcacatttgtccagatgaagcaaggccatataccctaaacttccatcctgggggtcagctgggctcctgggagattccagatcacacatcacactctggggactcaggaaccatgccccttccccaggcccccagcaagtctcaagaacacagctgcacaggccttgacttagagtgacagccggtgtcctggaaagccccaagcagctgccccagggacatgggaagaccacgggacctctttcactacccacgatgacctccgggggtatcctgggcaaaagggacaaagagggcaaatgagatcacctcctgcagcccaccactccagcacctgtgccgaggtctgcgtcgaagacagaatggacagtgaggacagttatgtcttgtaaaagacaagaagcttcagatggtaccccaagaaggatgtgagaggtggccgcttggagtttgcccctcacccaccagctgccccatccctgaggcagcgctccatgggggtatggttttgtcactgcccagacctagcagtgacatctcattgtccccagcccagtgggcattggaggtgccaggggagtcagggttgtagccaagacgcccccgcacggggagggttgggaagggggtgcaggaagctcaacccctctgggcaccaaccctgcattgcaggttggcaccttacttccctgggatccccagagttggtccaaggagggagagtgggttctcaatacggtaccaaagatataatcacctaggtttacaaatatttttaggactcacgttaactcacatttatacagcagaaatgctattttgtatgctgttaagtttttctatctgtgtacttttttttaagggaaagatttt

SEQ ID NO: 431 - DNA, 1840 bp, Homo sapiens
tccacacacacaaaaaacctgcgcgtgaggggggaggaaaagcagggcctttaaaaaggcaatcacaacaacttttgctgccaggatgcccttgctttggctgagaggatttctgttggcaagttgctggattatagtgaggagttcccccaccccaggatccgaggggcacagcgcggcccccgactgtccgtcctgtgcgctggccgccctcccaaaggatgtacccaactctcagccagagatggtggaggccgtcaagaagcacattttaaacatgctgcacttgaagaagagacccgatgtcacccagccggtacccaaggcggcgcttctgaacgcgatcagaaagcttcatgtgggcaaagtcggggagaacgggtatgtggagatagaggatgacattggaaggagggcagaaatgaatgaacttatggagcagacctcggagatcatcacgtttgccgagtcaggaacagccaggaagacgctgcacttcgagatttccaaggaaggcagtgacctgtcagtggtggagcgtgcagaagtctggctcttcctaaaagtccccaaggccaacaggaccaggaccaaagtcaccatccgcctcttccagcagcagaagcacccgcagggcagcttggacacaggggaagaggccgaggaagtgggcttaaagggggagaggagtgaactgttgctctctgaaaaagtagtagacgctcggaagagcacctggcatgtcttccctgtctccagcagcatccagcggttgctggaccagggcaagagctccctggacgttcggattgcctgtgagcagtgccaggagagtggcgccagcttggttctcctgggcaagaagaagaagaaagaagaggagggggaagggaaaaagaagggcggaggtgaaggtggggcaggagcagatgaggaaaaggagcagtcgcacagacctttcctcatgctgcaggcccggcagtctgaagaccaccctcatcgccggcgtcggcggggcttggagtgtgatggcaaggtcaacatctgctgtaagaaacagttctttgtcagtttcaaggacatcggctggaatgactggatcattgctccctctggctatcatgccaactactgcgagggtgagtgcccgagccatatagcaggcacgtccgggtcctcactgtccttccactcaacagtcatcaaccactaccgcatgcggggccatagcccctttgccaacctcaaatcgtgctgtgtgcccaccaagctgagacccatgtccatgttgtactatgatgatggtcaaaacatcatcaaaaaggacattcagaacatgatcgtggaggagtgtgggtgctcatagagttgcccagcccagggggaaagggagcaagagttgtccagagaagacagtggcaaaatgaagaaatttttaaggtttctgagttaaccagaaaaatagaaattaaaaacaaaacaaaacaaaaaaaaaaacaaaaaaaaacaaaagtaaattaaaaacaaacctgatgaaacagatgaaacagatgaaggaagatgtggaaatcttagcctgccttagccagggctcagagatgaagcagtgaagagacagattgggagggaaagggagaatggtgtaccctttatttcttctgaaatcacactgatgacatcagttgtttaaacggggtattgtcctttccccccttgaggttcccttgtgagcttgaatcaaccaatctgatctgcagtagtgtggactagaacaacccaaatagcatctagaaagccatgagtttgaaagggcccatcacaggcactttcctagcctaat

SEQ ID NO: 432 - DNA, 1391 bp, Homo sapiens
ggggcagccggaacagcagttggagcctgggtgctggtcctcagtctgtggggggcagtagtaggtgctcaaaacatcacagcccggattggcgagccactggtgctgaagtgtaagggggcccccaagaaaccaccccagcggctggaatggaaactgaacacaggccggacagaagcttggaaggtcctgtctccccagggaggaggcccctgggacagtgtggctcgtgtccttcccaacggctccctcttccttccggctgtcgggatccaggatgaggggattttccggtgcagggcaatgaacaggaatggaaaggagaccaagtccaactaccgagtccgtgtctaccagattcctgggaagccagaaattgtagattctgcctctgaactcacggctggtgttcccaataaggtggggacatgtgtgtcagagggaagctaccctgcagggactcttagctggcacttggatgggaagcccctggtgcctaatgagaagggagtatctgtgaaggaacagaccaggagacaccctgagacagggctcttcacactgcagtcggagctaatggtgaccccagcccggggaggagatccccgtcccaccttctcctgtagcttcagcccaggccttccccgacaccgggccttgcgcacagcccccatccagccccgtgtctgggagcctgtgcctctggaggaggtccaattggtggtggagccagaaggtggagcagtagctcctggtggaaccgtaaccctgacctgtgaagtccctgcccagccctctcctcaaatccactggatgaaggatggtgtgcccttgccccttccccccagccctgtgctgatcctccctgagatagggcctcaggaccagggaacctacagctgtgtggccacccattccagccacgggccccaggaaagccgtgctgtcagcatcagcatcatcgaaccaggcgaggaggggccaactgcaggctctgtgggaggatcagggctgggaactctagccctggccctggggatcctgggaggcctggggacagccgccctgctcattggggtcatcttgtggcaaaggcggcaacgccgaggagaggagaggaaggccccagaaaaccaggaggaagaggaggagcgtgcagaactgaatcagtcggaggaacctgaggcaggcgagagtagtactggagggccttgaggggcccacagacagatcccatccatcagctcccttttctttttcccttgaactgttctggcctcagaccaactctctcctgtataatctctctcctgtataaccccaccttgccaagctttcttctacaaccagagccccccacaatgatgattaaacacctgacacatcttgca

SEQ ID NO: 433 - DNA, 1860 bp, Homo sapiens
cgcgcggggaagggaagaagaggacgaggtggcgcagagaccgcgggagaacacagtgcctccggaggaaatctgctcggtccccggcagccgcgcttcccctttgatgttttggtacgccgtggccatgcgcctcacattagaattactgcactgggcagactaagttggatctcctctcttcagtgaaaccctcaattccatcaaaaactaaagggatgtggagagtgcggaaaaggggctactttgggatttggtccttccccttaataatcgccgctgtctgtgcgcagagtgtcaatgaccctagtaatatgtcgctggttaaagagacggtggatagactcctgaaaggctatgacattcgtctgagaccagattttggaggtccccccgtggctgtggggatgaacattgacattgccagcatcgatatggtttctgaagtcaatatggattataccttgacaatgtactttcaacaagcctggagagataagaggctgtcctataatgtaatacctttaaacttgactctggacaacagagtggcagaccagctctgggtgcctgatacctatttcctgaacgataagaagtcatttgtgcacggagtgactgttaagaaccgcatgattcgcctgcatcctgatggcaccgtcctttatggactcagaatcacaaccacagctgcctgcatgatggacctaaggaggtacccactggatgaacaaaactgcaccttggaaattgagagctatggatacacaactgatgacattgagttttactggcgtggcgatgataatgcagtaacaggagtaacgaaaattgaacttccacagttctctattgtagattacaaacttatcaccaagaaggttgttttttccacaggttcctatcccaggttatccctcagctttaagcttaagagaaacattggctactttatcctgcaaacatacatgccttccatcctgattaccatcctctcctgggtctccttctggattaattacgatgcttcagctgcaagggtggcattaggaatcacaactgtcctcacaatgaccacaatcaacacccacctccgggaaactctccctaaaatcccctatgtgaaggccattgacatgtacctgatggggtgctttgtcttcgttttcatggcccttctggaatatgccctagtcaactacatcttctttgggagggggccccaacgccaaaagaaagcagctgagaaggctgccagtgccaacaatgagaagatgcgcctggatgtcaacaagatggacccccatgagaacatcttactgagcactctcgagataaaaaatgaaatggccacatctgaggctgtgatgggacttggagaccccagaagcacaatgctagcctatgatgcctccagcatccagtatcggaaagctgggttgcccaggcatagttttggccgaaatgctctggaacgacatgtggcgcaaaagaaaagtcgcctgaggagacgcgcctcccaactgaaaatcaccatccctgacttgactgatgtgaatgccatagatcggtggtcccgcatattcttcccagtggttttttccttcttcaacatcgtctattggctttattatgtgaactaaaacatggcctcccactggaagcaaggactagattcctcctcaaaccagttgtacagcctgatgtaggacttggaaaacacatcaatccaggacaaaagtgacgctaaaataccttagttgctggcctatcctgtggtccatttcataccatttgggttgcttctgctaagtaatgaatacactaaggtccttgtggttttccagttaaaacgcaagt

SEQ ID NO: 434 - DNA, 594 bp, Homo sapiens
atgcagcgctggaaggcggcggccttggcctcagtgctctgcagctccgtgctgtccatctggatgtgtcgagagggcctgcttctcagccaccgcctcggacctgcgctggtccccctgcaccgcctgcctcgaaccctggacgcccggattgcccgcctggcccagtaccgtgcactcctgcagggggccccggatgcgatggagctgcgcgagctgacgccctgggctgggcggcccccaggtccgcgccgtcgggcggggccccggcggcggcgcgcgcgtgcgcggttgggggcgcggccttgcgggctgcgcgagctggaggtgcgcgtgagcgagctgggcctgggctacgcgtccgacgagacggtgctgttccgctactgcgcaggcgcctgcgaggctgccgcgcgcgtctacgacctcgggctgcgacgactgcgccagcggcggcgcctgcggcgggagcgggtgcgcgcgcagccctgctgccgcccgacggcctacgaggacgaggtgtccttcctggacgcgcacagccgctaccacacggtgcacgagctgtcggcgcgcgagtgcgcctgcgtgtga

SEQ ID NO: 435 - DNA, 1004 bp, Homo sapiens
gcctcgctcgggcgcccagtggtcctgccgcctggtctcacctcgccatggttcgtctgcctctgcagtgcgtcctctggggctgcttgctgaccgctgtccatccagaaccacccactgcatgcagagaaaaacagtacctaataaacagtcagtgctgttctttgtgccagccaggacagaaactggtgagtgactgcacagagttcactgaaacggaatgccttccttgcggtgaaagcgaattcctagacacctggaacagagagacacactgccaccagcacaaatactgcgaccccaacctagggcttcgggtccagcagaagggcacctcagaaacagacaccatctgcacctgtgaagaaggctggcactgtacgagtgaggcctgtgagagctgtgtcctgcaccgctcatgctcgcccggctttggggtcaagcagattgctacaggggtttctgataccatctgcgagccctgcccagtcggcttcttctccaatgtgtcatctgctttcgaaaaatgtcacccttggacaagctgtgagaccaaagacctggttgtgcaacaggcaggcacaaacaagactgatgttgtctgtggtccccaggatcggctgagagccctggtggtgatccccatcatcttcgggatcctgtttgccatcctcttggtgctggtctttatcaaaaaggtggccaagaagccaaccaataaggccccccaccccaagcaggaaccccaggagatcaattttcccgacgatcttcctggctccaacactgctgctccagtgcaggagactttacatggatgccaaccggtcacccaggaggatggcaaagagagtcgcatctcagtgcaggagagacagtgaggctgcacccacccaggagtgtggccacgtgggcaaacaggcagttggccagagagcctggtgctgctgctgcaggggtgcaggcagaagcggggagctatgcccagtcagtgccagcccctc

SEQ ID NO: 436 - DNA, 304 bp, Homo sapiens
gccaactcccctccgctccagtcacttgtctggagcttgaagaagtgggtattccccttcccaccccaggcactggaggaggcggccccccggggattccaggacctgagctccgggagctggactcgcagcgacgcggcagagcgacgggcgccgggaagcgaggagacgcccgcgggaggcccagctgctcggagcaactggcatggcccgagccatggccgccgcgtggccgctgctgctggtggcgctactggtgctgtcctggccacccccaggaaccggtgagtgacccccgcgcagt

SEQ ID NO: 437 - DNA, 860 bp, Homo sapiens
tttggttttacatttgtgagctaccaactagcacaaaacatgttcatcttccttttctcacaacaataggaaattgttagaaaagtatagaaaaagttctattttttcataaggcaaatttaatacagattttgctatgaagttgaaaaaaaaaaagtaaatgaaaaggtatgtgctggctgcttggggggcaaggctcataaatcactgtacgttaagagcacgtgctgaaacttcatggtgccagtcacgtaattttgtgtatttgggactaaagacgtgaaggggtatcttttcctttgccttctttgtattatcggcttcagattctttcaaatgttcagtcccagtgatctgggcaaggattcggaaagagcgagactgagttgttccagtccttggacgccagtcttcagtatcctcaatcagtctcttcttgctggcatcactgtgagtgggtacatgataaaactctgtatagcgctccacaatgtgttttcttggtgggccattttgctgtttactgtcaccctgggatcctcttctctgtccctctgctagctcctgagaagtctcggaacacacgctggtgactgtgggcttttgaacaggaaccggctcaggcttggtgcagcagatgctctttgcagagtcatattcaaagagcctgtaccacccttaatcttattctgggcttcaagatgagtctttccttgtgcatttattccatccatgctggagacccacatcgcctatcttacatttggctgggcttgcttgccgccatcttttaaactagaagatggcagaagcatgttgaaatccttaccggcctgcaaccggaaaccccaggaactggg

SEQ ID NO: 438 - DNA, 4548 bp, Homo sapiens
gaattccgggagcccgcggaggctgctgcagcagcccgaaccggcgtccgagtccggggaaggcccccgcgagcgcagggaggggccggaaagttccggcgaactgggggagcggcagtgggagagcgtcgggcgggaggcggtggtcctgggagcggccccggcgcccgaagccgccccgagctggtggggagggtcccggccggtggggccgggctggcgggggaggggcgcctgggggtgcaagaggcgaattggctgcccggggtgcaggagggacaggtggtgcgggctgtcaggaaacctacctgaacgggaaggagccccaggagggagagggacccggcgagggctcaggacccggaggcgccggcggaggaggaggtggtgactggcaggcccgggccccacggtacctccggggctgaaggggacgcaggatgtaggggcatggggagtcgggcgcagaagagtgcggggaacgctgagctctgggagccactgcctgagggcaggccgcggccggcgggaacctcttctgccgtctcagcctgggcgtcgctgaagctgtgtctgcggggaggcagcggaaggcggcagaggctgggaggcggcagaatgcagccagaggagggcacaggctggctgctggagctgctgtccgaggtgcagctgcaacagtacttcctgcggctccgagatgacctcaacgtcacccgcctgtcccactttgagtacgtcaagaatgaggacctggagaagatcggcatgggtcggcctggccagcggcggctgtgggaggctgtgaagaggaggaaggccttgtgcaaacgcaagtcgtggatgagtaaggtgttcagtggaaagcgactggaggctgagttcccacctcatcactctcagagcaccttccggaagacctcgcccgcccctgggggcccagcaggggaggggcccctgcagagcctcacctgcctcattggggagaaggacctgcgcctcctggagaagctgggtgatggttcctttggcgtggtgcgcaggggcgagtgggacgcgccctcagggaagacggtgagtgtggctgtgaagtgcctgaagcccgatgtcctgagccagccagaagccatggacgacttcatccgggaggtcaatgccatgcactcgctcgaccaccgaaacctcatccgcctctacggggtggtgctcacgccgcccatgaagatggtgacagagctggcacctctgggatcgttgttggaccggctacgtaagcaccagggccacttcctcctggggactctgagccgctacgctgtgcaggtggctgagggcatgggctacctggagtccaagcgctttattcaccgtgacctggctgcccgcaatctgctgttggctacccgcgacctggtcaagatcggggactttgggctgatgcgagcactacctcagaatgacgaccattacgtcatgcaggaacatcgcaaggtgcccttcgcctggtgtgcccccgagagcctgaagacacgcaccttctcccatgccagcgacacctggatgttcggggtgacactgtgggaaatgttcacctacggccaggagccctggatcggcctcaacggcagtcagatcctgcataagatcgacaaggagggggagcggctgccccggcccgaggactgtccccaggacatctacaacgtcatggtccagtgctgggctcacaagccagaggacagacccacgtttgtggccctgcgggacttcctgctggaggcccagcccacagacatgcgggcccttcaggactttgaggaaccggacaagctgcacatccagatgaatgatgtcatcaccgtcatcgagggaagggccgagaactactggtggcgtggccagaacacacggacgctgtgtgtggggcccttccctcgcaacgtggtgacctccgtggccggcctgtcggcccaggacatcagccagcccctgcagaacagcttcatccacacagggcatggcgacagtgacccccgccactgctggggcttcccggacaggattgacgaactgtatctgggaaaccccatggacccccccgacctcctgagcgtggaactgagcacctcccggcccccccagcatctaggaggggtgaaaaaaccaacctatgaccctgtgagcgaggaccaagaccccttgtccagcgacttcaagaggctgggcctgcggaagccaggcctgccccgagggctgtggctggcgaagccctcggcgcgggtgccgggcaccaaggccagccgaggcagcggggctgaggtcacgctcatcgacttcggtgaggagcccgtggtcccggccctacggccctgcccgccctccctggcgcagctggccatggacgcctgctccctgctggacgagaccccgcctcagagccccacgcgggcactgccccggcccctgcaccccacgcctgtggtggactgggacgcacgcccgctgccccccccgcccgcctatgacgacgtggcccaggatgaggatgactttgagatctgctccatcaacagcaccctcgtgggcgcgggggtccctgccgggcccagccagggccagaccaactacgcctttgtgcctgagcaggcgcggccgccccctcccctggaggacaacctgttcctcccgccccagggtgggggcaagccgcccagctccgcacagaccgcagagatcttccaggcgctacagcaggagtgcatgaggcaactgcaggctccgggctccccggccccctctcccagcccggggggtgacgacaagccccaggtgcctcctcgggtacccatcccccctcggcccacgcgcccacacgtccagctgtctccagcccccccgggcgaggaggagaccagccagtggcctggacctgcttcccctccccgggtgcctccgcgggagcccctgtcccctcaaggctcgaggacacccagccccctggtaccacctggcagctccccgctgccaccccggctctcaagctcacctgggaagaccatgcccaccacccagagctttgcctcagaccccaagtacgccaccccccaggtgatccaggcccctggcgcgggtggtccctgcatcctgcccatcgtccgggatggcaagaaggtcagcagcacccactattacttgctgcccgagcgaccatcctacctggagcgctaccagcgcttcctgcgtgaggcccagagccccgaggagcctacccccctgcctgtgcctctgctgctgcccccacccagcaccccagcccccgccgcccccacggccaccgtgcggccgatgccccaggctgccttggaccccaaggccaacttctccaccaacaacagcaacccaggggcccggccaccacccccgagggccactgctcggctgccacagaggggctgccctggcgatgggccagaggcgggccggccagcagacaagatccagatggccatggtgcatggggtgaccacagaggagtgccaggcggccctgcagtgccacggctggagcgtgcagagggctgcccagtatctgaaggtggagcagctcttcgggctgggtctgcggcccagaggggagtgccacaaagtgctggagatgttcgactggaacctggagcaggccggctgccaccttctgggctcctggggccctgcccaccacaagcgctgagatgcgtctggagagccagagggcctgcctgaaggaatcacctgagcctgtccgtccaccaggagtggggagatgcccccatccagtcctggaggacccgctgctcctgctgctcccggggatggagcaaggccaaggctgcgggaggctgggagccctgccctgcccatccctcccgcaccagtgctgtccctgcacactttggttcagtcccggtgcccctgccaagatgtggaaggggccgggtgaagacaggcttgagggccgccccagcaggctctgggtatgacctgcctctggccctggtcctgggcggggcctgtgggtggagtagtacccccaggccctgccctgggtgacagactgggaggaaaccaggctggacctgggcaggcgggatgtgttggccacagggagaggcggaccggcacccggtgggacctcctaggactgggccttcttccagggggcccctggcagcagctggggtgtcgggcagaatgtgacttgtggccttaccatggacttgaatgggacttggctggcctcaggatcttgtgcctggaaatagcctgaggtggctcaggaagcggagaaagggtgccagaccattctctggcggggaccagggcccaaggccagggctggaaggagaccaaggggcagcccctggaggacatcagtgcttcctcttccacccaattcccccacgcggttccatgttttcccaccagcctgttgggcgaagttgctgctccggcattcagtcctgcttcttccagagaaataaagttagtttctattttatgttaaaaaaaa

SEQ ID NO: 439 - DNA, 2564 bp, Homo sapiens
gatttcagttgaaagatgtgtttttgtgagtagagcaccgcagaagaactgaagactgttgtgtgctccccgcagaaggggctaccatgatcctttcctcctataacaccatccagtcggttttctgttgctgctgttgctgttcagtgcagaagcgacaaatgagaacacagataagcctgagcacagatgaagagcttccagaaaaatacacccagcatcgcaggccgtggctcagccaattgtcaaataagaagcaatccaacacgggccgtgtgcagccgtcaaaacgaaagccactgcctcccctcccaccctctgaggttgctgaagagaagatccaagtcaaggcactttatgattttctgcccagagaaccctgtaatttagccttaaggagagcagaagaatacctgatactggagaaatacaatcctcactggtggaaggcaagagaccgtttggggaatgaaggcttaatcccaagcaactatgtgactgaaaacaaaataactaatttagaaatatatgagtggtaccatagaaacattaccagaaatcaggcagaacatctattgagacaagagtctaaagaaggtgcatttattgtcagagattcaagacatttaggatcctacacaatttccgtatttatgggagctagaagaagtacggaggctgccataaaacattatcagataaaaaagaatgactcaggacagtggtatgtggctgaaagacacgcctttcaatcaatccctgagttaatctggtatcaccagcacaatgcagccggtctcatgactcgtctccgatatccagttgggctgatgggcagttgtttaccagccacagctgggtttagctacgaaaagtgggagatagatccatctgagttggcttttataaaggagattggaagcggtcagtttggagtggtccatttaggtgaatggcggtcacatatccaggtagctatcaaggccatcaatgaaggctccatgtctgaagaggatttcattgaagaggccaaagtgatgatgaaattatctcattcaaagctagtgcaactttatggagtctgtatacagcggaagcccctttacattgtgacagagttcatggaaaatggctgcctgcttaactatctcagggagaataaaggaaagcttaggaaggaaatgctactgagtgtatgccaggatatatgtgaaggaatggaatatctggagaggaatggctatattcatagggatttggcggcaaggaattgtttggtcagttcaacatgcatagtaaaaatttcagactttggaatgacaaggtacgttttggatgatgagtatgtcagttcttttggagccaagttcccaatcaagtggtcccctcctgaagtttttcttttcaataagtacagcagtaaatctgatgtctggtcatttggagttttaatgtgggaagtttttacagaaggaaaaatgccttttgaaaataagtcaaatttgcaagtcgtggaagctatttctgaaggcttcaggctatatcgccctcacctggcaccaatgtccatatatgaagtcatgtacagctgctggcatgagaaacctgaaggccgccctacatttgcggagctgctgcgggctgtcacagagattgcggaaacctggtgaccggaaacagaatgccaacccaaagagtcatcttgcaaaactgtcatttattgtgaatatcttcaccatatggggtcacttatggtgaatatctttcttcagagttgctgactcttgaaaacagtgcaaagatcacagtttttaaaagttttaaaaatttaagaatattcacacaatcgtttttctatgtgtgagagggatttgcacactcttatttttctgtaaaatatttcacatcccaaatgtgaagaagtgaaaaagacttcgcagcagtcttcattgtggtgctcttcatgatcatagccccaggaacccttgaggttcttcttcacaaggctgagagtgcttccttcttgaagacgagtgtcattcatcacttcagtgatccatgcatagaatatgaaaataaattcttccaactcatgggataaaggggactcccttgaagaatttcatgtttttgggctgtatagctctttacagaaaatgcacctttataaatcacatgaatgttagtattctggaaatgtcttttgttaatataatcttcccatgttatttaacaaattgtttttgcacatatctgattatattgaaagcagtttttttgcattcgagttttaaacactgttataaaatgtagccaaagctcacctttgaacagatcccggtgacattctatttccaggaaaatccggaacctgattttagttctgtgattttacactttttacatgtgagattggacagtttcagaggccttattttgtcatactaagtgtctcctgtaattttcaggaagatgatttgttctttccagaagaggagacaaaagcaagatagccaaatgtgacatcaagctccattgtttcggaaatccaggattttgaattc

SEQ ID NO: 440 - DNA, 4176 bp, Homo sapiens
gacgcgggcgcggaaggagcgcggccggaggtcctcaggaagaagccgcggggactggctgcgcttgacaggctgcacttggatgggagcacctggtgcctcgggactgctccgatgcccgggtctgtgctgaatgtgtaatatgcggaactatattgaaacattacaaccatcttttgatggcaacaccctgaggacctcccttttccagatggggaaactgaggcccagaattgctaagtggcttgcttgagttgacacagggagctccaggactcaccctcagctgagccacctgccgggagcatgcctctgcgccactgggggatggccaggggcagtaagcccgttggggatggagcccagcccatggctgccatgggaggcctgaaggtgcttctgcactgggctggtccaggcggcggggagccctgggtcactttcagtgagtcatcgctgacagctgaggaagtctgcatccacattgcacataaagttggtatcactcctccttgcttcaatctctttgccctcttcgatgctcaggcccaagtctggttgcccccaaaccacatcctagagatccccagagatgcaagcctgatgctatatttccgcataaggttttatttccggaactggcatggcatgaatcctcgggaaccggctgtgtaccgttgtgggcccccaggaaccgaggcatcctcagatcagacagcacaggggatgcaactcctggacccagcctcatttgagtacctctttgagcagggcaagcatgagtttgtgaatgacgtggcatcactgtgggagctgtcgaccgaggaggagatccaccactttaagaatgagagcctgggcatggcctttctgcacctctgtcacctcgctctccgccatggcatccccctggaggaggtggccaagaagaccagcttcaaggactgcatcccgcgctccttccgccggcatatccggcagcacagcgccctgacccggctgcgccttcggaacgtcttccgcaggttcctgcgggacttccagccgggccgactctcccagcagatggtcatggtcaaatacctagccacactcgagcggctggcaccccgcttcggcacagagcgtgtgcccgtgtgccacctgaggctgctggcccaggccgagggggagccctgctacatccgggacagtggggtggcccctacagaccctggccctgagtctgctgctgggcccccaacccacgaggtgctggtgacaggcactggtggcatccagtggtggccagtagaggaggaggtgaacaaggaggagggttctagtggcagcagtggcaggaacccccaagccagcctgtttgggaagaaggccaaggctcacaaggcattcggccagccggcagacaggccgcgggagccactgtgggcctacttctgtgacttccgggacatcacccacgtggtgctgaaagagcactgtgtcagcatccaccggcaggacaacaagtgcctggagctgagcttgccttcccgggctgcggcgctgtccttcgtgtcgctggtggacggctatttccgcctgacggccgactccagccactacctgtgccacgaggtggctcccccacggctggtgatgagcatccgggatgggatccacggacccctgctggagccatttgtgcaggccaagctgcggcccgaggacggcctgtacctcattcactggagcaccagccacccctaccgcctgatcctcacagtggcccagcgtagccaggcaccagacggcatgcagagcttgcggctccgaaagttccccattgagcagcaggacggggccttcgtgctggagggctggggccggtccttccccagcgttcgggaacttggggctgccttgcagggctgcttgctgagggccggggatgactgcttctctctgcgtcgctgttgcctgccccaaccaggagaaacctccaatctcatcatcatgcggggggctcgggccagccccaggacactcaacctcagccagctcagcttccaccgggttgaccagaaggagatcacccagctgtcccacttgggccagggcacaaggaccaacgtgtatgagggccgcctgcgagtggagggcagcggggaccctgaggagggcaagatggatgacgaggaccccctcgtgcctggcagggaccgtgggcaggagctacgagtggtgctcaaagtgctggaccctagtcaccatgacatcgccctggccttctacgagacagccagcctcatgagccaggtctcccacacgcacctggccttcgtgcatggcgtctgtgtgcgcggccctgaaaatagcatggtgacagagtacgtggagcacggacccctggatgtgtggctgcggagggagcggggccatgtgcccatggcttggaagatggtggtggcccagcagctggccagcgccctcagctacctggagaacaagaacctggttcatggtaatgtgtgtggccggaacatcctgctggcccggctggggttggcagagggcaccagccccttcatcaagctgagtgatcctggcgtgggcctgggcgccctctccagggaggagcgggtggagaggatcccctggctggcccccgaatgcctaccaggtggggccaacagcctaagcaccgccatggacaagtgggggtttggcgccaccctcctggagatctgctttgacggagaggcccctctgcagagccgcagtccctccgagaaggagcatttctaccagaggcagcaccggctgcccgagccctcctgcccacagctggccacactcaccagccagtgtctgacctatgagccaacccagaggccatcattccgcaccatcctgcgtgacctcacccgcgtgcagccccacaatcttgctgacgtcttgactgtgaaccgggactcaccggccgtcggacctactactttccacaagcgctatttgaaaaagatccgagatctgggcgagggtcacttcggcaaggtcagcttgtactgctacgatccgaccaacgacggcactggcgagatggtggcggtgaaagccctcaaggcagactgcggcccccagcaccgctcgggctggaagcaggagattgacattctgcgcacgctctaccacgagcacatcatcaagtacaagggctgctgcgaggaccaaggcgagaagtcgctgcagctggtcatggagtacgtgcccctgggcagcctccgagactacctgccccggcacagcatcgggctggcccagctgctgctcttcgcccagcagatctgcgagggcatggcctatctgcacgcgcacgactacatccaccgagacctagccgcgcgcaacgtgctgctggacaacgacaggctggtcaagatcggggactttggcctagccaaggccgtgcccgaaggccacgagtactaccgcgtgcgcgaggatggggacagccccgtgttctggtatgccccagagtgcctgaaggagtataagttctactatgcgtcagatgtctggtccttcggggtgaccctgtatgagctgctgacgcactgtgactccagccagagcccccccacgaaattccttgagctcataggcattgctcagggtcagatgacagttctgagactcactgagttgctggaacgaggggagaggctgccacggcccgacaaatgtccctgtgaggtctatcatctcatgaagaactgctgggagacagaggcgtcctttcgcccaaccttcgagaacctcatacccattctgaagacagtccatgagaagtaccaaggccaggccccttcagtgttcagcgtgtgctgaggcacaatggcagccctgcctgggaggactggaccaggcagtggctgcagagggagcctcctgctccctgctccaggatgaaaccaagagggggatgtcagcctcacccacaccgtgtgccttactcctgtctagagaccccacctctgtgaacttatttttctttcttggccgtgagcctaaccatgatcttgagggacccaacatttgtaggggcactaatccagcccttaaatcccccagcttccaaacttgaggcccaccatctccaccatctggtaataaactcatgttttctctgctggg

SEQ ID NO: 441 - DNA, 610 bp, Homo sapiens
  misc_feature (531)..(531): n is a, c, g, or t
gcggcggtcgagctgggccgccgcgcccccctgctcgcggcgctgctcgtcgacctcgccgggtgtgaagaagatccgcagctccacgcagcaagacccgcgccgccgggacccccaggacgacgtgtacctggacatcaccgatcgcctttgttttgccattctctacagcagaccaaagagtgcatcaaatgtacattatttcagcatagataatgaacttgaatatgagaacttctacgcagattttggaccactcaatctggcaatggtttacagatattgttgcaagatcaataagaaattaaagtccattacaatgttaaggaagaaaattgttcattttactggctctgatcagagaaaacaagcaaatgctgccttccttgttggatgctacatggttatatatttggggagaaccccagaagaagcatatagaatattaatctttggagagacatcctatattcctttcagagatgctgcctatggaagttgcaatttctacattacacttcttgactgttntcatgcagtaaagaaggcaatgcagtatggcttccttaatttcaactcatttaaccttgatgaatatgaacactatgaa

SEQ ID NO: 442 - DNA, 1529 bp, Homo sapiens
ggacgacaaggcgttcaccaaggagctggaccagtgggtcgagcagctgaacgactgtaagcagctgaacgagaaccaagtgcggacgctgtgcgagaaggcaaaggaaattttaacaaaagaatcaaatgtgcaagaggttcgttgccctgttactgtctgtggagatgtgcatggtcaatttcatgatcttatggaactctttagaattggtggaaaatcaccggatacaaactacttattcatgggtgactatgtagacagaggatattattcagtggagactgtgactcttcttgtagcattaaaggtgcgttatccagaacgcattacaatattgagaggaaatcacgaaagccgacaaattacccaagtatatggcttttatgatgaatgtctgcgaaagtatgggaatgccaacgtttggaaatattttacagatctctttgattatcttccacttacagctttagtagatggacagatattctgcctccatggtggcctctctccatccatagacacactggatcatataagagccctggatcgtttacaggaagttccacatgagggcccaatgtgtgatctgttatggtcagatccagatgatcgtggtggatggggtatttcaccacgtggtgctggctacacatttggacaagacatttctgaaacctttaaccatgccaatggtctcacactggtttctcgtgcccaccagcttgtaatggagggatacaattggtgtcatgatcggaatgtggttaccattttcagtgcacccaattactgttatcgttgtgggaaccaggctgctatcatggaattagatgacactttaaaatattccttccttcaatttgacccagcgcctcgtcgtggtgagcctcatgttacacggcgcaccccagactacttcctataaatttctcctgggaaacctgcctttgtatgtggaagtatacctggctttttaaaatatatgtatttaaaaacaaaaagcaacagtaatctatgtgttctgtaacaaattgggatctgtcttggcattaaaccacatgatggaccaaatgtgccatactaatgatgagcatttagcacaatttgagactgaaatttagtacactatgttcatggtcagcttaacagtttgctggtgatttatagtaacattttctttgactgtcaagcaaaaggtaactaactgcttcatctccttttgcgcttattggaaattttagttatagtgtttactggcatggattaatagagttggagttttatttttaagaaaaattcacaagctaagttccactaatccattatcctttattttattgaaatgtataattaacttaactgaacaaaaggttcttcttgggagtatgttgtcataacatttaaagagatttcccttcatttaaactaaattactgttttatgttgatctgcatatttctgtatatttgtcatgacagtgcttgcatcctatttggtgtactcagcaaataaactttcgtttaaac

SEQ ID NO: 443 - DNA, 630 bp, Homo sapiens
atggtcgactacctagcaaataagcccaagggtcagaattctttggctttacacaaagtcatcatggtgggcagtggtggcgtgggcaagtcagctctgactctacagttcatgtacgatgagtttgtggaggactatgagcctaccaaagcagacagctatcggaagaaggtagtgctagatggggaggaagtccagatcgatatcttagatacagctgggcaggaggactacgctgcaattagagacaactacttccgaagtggggaggggttcctctgtgttttctctattacagaaatggaatcctttgcagctacagctgacttcagggagcagattttaagagtaaaagaagatgagaatgttccatttctactggttggtaacaaatcagatttagaagataaaagacaggtttctgtagaagaggcaaaaaacagagctgagcagtggaatgttaactacgtggaaacatctgctaaaacacgagctaatgttgacaaggtattttttgatttaatgagagaaattcgagcgagaaagatggaagacagcaaagaaaagaatggaaaaaagaagaggaaaagtttagccaagagaatcagagaaagatgctgcattttataa

SEQ ID NO: 444 - DNA, 2131 bp, Homo sapiens
ccgccgccatccgccctctctacccccccatccccaggtgaggggggtgagttcaggaagcggagaccccgaggaacccagcagggtcaccatttgcagcgcaacatggcaggagctggaggagggaatgatattcagtggtgtttttctcaggtgaaaggagcagtagatgatgatgtagcagaagcagatataatttctacagtagaatttaatcattctggagaattactagcaacaggagataaaggtggtagagttgtcatctttcaacaggagcaggagaacaaaatccagtctcatagcagaggagaatataatgtttacagcaccttccagagccatgaaccagagtttgactacttgaaaagtttagaaatagaagaaaagatcaataaaattaggtggttaccccagaaaaatgctgctcagtttttattgtctaccaatgataaaacaataaaattatggaaaatcagtgaaagggacaaaagaccagaagggtataacttgaaagaggaggatggaaggtatagagatcctactacagttactacactacgagtgccagtctttaggcctatggatctaatggttgaggccagtccacgaagaatatttgccaatgctcatacatatcacatcaactcaatttctattaatagtgattatgaaacatatttatctgcagatgatttgcggattaatctttggcatctggaaattacagacaggagttttaacattgtggatatcaagcctgccaatatggaagagctaacagaggtgattacagcagcagaatttcatccaaacagctgtaacacatttgtatacagcagcagtaaaggaactattcggctatgtgacatgagggcatctgccctctgtgatagacattctaaattgtttgaagaacctgaagatcccagtaacaggtcatttttttccgaaatcatctcctctatttcggatgtaaaattcagccatagtggtcgatatatgatgactagagactatttgtcagtcaaaatttgggacttaaatatggaaaacaggcctgtggaaacataccaggtgcatgaatacctcagaagtaaactctgttcactgtatgaaaatgactgcatatttgacaaatttgaatgttgttggaatggatctgacagtgttgtcatgactggatcttacaataatttcttcagaatgtttgacagaaacacaaagcgagacataaccctagaagcatcgcgggaaaacaataagcctcgcacagttctgaagcctcgcaaagtctgtgcaagtggcaagcgaaagaaagatgaaataagtgttgacagcctagacttcaataagaaaatccttcacacagcctggcaccccaaggaaaatatcattgccgtagctactacaaacaatctgtatatatttcaagacaaagtgaattagggttggcattcctagcagaagaacccacttcctgcttagttgagatagttgaatctagcattcgttcctataaaagagagaggtccattgtggcgcccctttccagtgtttgacagtgtgccattcgacaacacattgttatagctacatggagaaagctctgtggattcatcactgtggtgttctccatgtctgctagccatttaggtaagggtagggcacttttaatttaaatgacttcttgcaccatcttgcctaatggactagattggactgtatcaacattgatttactccactttttatgccttccattgtgatgacgtcaaacacagtgaaagccttcagtcatgctatgggatttaattgtgtatcctcattactgtatcatttgtggggtacaccccttccccctttttttaaattaaatacagctcattcttactgtggcttgtagcattcctcctcttctggcctcctggactgctccccttcatctcttacccttgccccctccacccggtcttggtggtggtatattaaaaaaagaaagaatgaaagcacacaaaatgagtcagtttggggtcagtggtataaagggggtatatgttgcaaacaaatgttttagtaacagttggctgtaatcactcctcgccgtgtctggcactgaaaataaggaaaag

SEQ ID NO: 445 - DNA, 2000 bp, Homo sapiens
tttgggctgtgtgtgcgacgcgggtcggaggggcagtcgggggaaccgcgaagaagccgaggagcccggagccccgcgtgacgctcctctctcagtccaaaagcggcttttggttcggcgcagagagacccgggggtctagcttttcctcgaaaagcgccgccctgcccttggccccgagaacagacaaagagcaccgcagggccgatcacgctgggggcgctgaggccggccatggtcatggaagtgggcaccctggacgctggaggcctgcgggcgctgctgggggagcgagcggcgcaatgcctgctgctggactgccgctccttcttcgctttcaacgccggccacatcgccggctctgtcaacgtgcgcttcagcaccatcgtgcggcgccgggccaagggcgccatgggcctggagcacatcgtgcccaacgccgagctccgcggccgcctgctggccggcgcctaccacgccgtggtgttgctggacgagcgcagcgccgccctggacggcgccaagcgcgacggcaccctggccctggcggccggcgcgctctgccgcgaggcgcgcgccgcgcaagtcttcttcctcaaaggaggatacgaagcgttttcggcttcctgcccggagctgtgcagcaaacagtcgacccccatggggctcagccttcccctgagtactagcgtccctgacagcgcggaatctgggtgcagttcctgcagtaccccactctacgatcagggtggcccggtggaaatcctgccctttctgtacctgggcagtgcgtatcacgcttcccgcaaggacatgctggatgccttgggcataactgccttgatcaacgtctcagccaattgtcccaaccattttgagggtcactaccagtacaagagcatccctgtggaggacaaccacaaggcagacatcagctcctggttcaacgaggccattgacttcatagactccatcaagaatgctggaggaagggtgtttgtccactgccaggcaggcatttcccggtcagccaccatctgccttgcttaccttatgaggactaatcgagtcaagctggacgaggcctttgagtttgtgaagcagaggcgaagcatcatctctcccaacttcagcttcatgggccagctgctgcagtttgagtcccaggtgctggctccgcactgttcggcagaggctgggagccccgccatggctgtgctcgaccgaggcacctccaccaccaccgtgttcaacttccccgtctccatccctgtccactccacgaacagtgcgctgagctaccttcagagccccattacgacctctcccagctgctgaaaggccacgggaggtgaggctcttcacatcccattgggactccatgctccttgagaggagaaatgcaataactctgggaggggctcgagagggctggtccttatttatttaacttcacccgagttcctctgggtttctaagcagttatggtgatgacttagcgtcaagacatttgctgaactcagcacattcgggaccaatatatagtgggtacatcaagtccatctgacaaaatggggcagaagagaaaggactcagtgtgtgatccggtttctttttgctcgcccctgttttttgtagaatctcttcatgcttgacatacctaccagtattattcccgacgacacatatacatatgagaatataccttatttatttttgtgtaggtgtctgccttcacaaatgtcattgtctactcctagaagaaccaaatacctcaatttttgtttttgagtactgtactatcctgtaaatatatcttaagcaggtttgttttcagcactgatggaaaataccagtgttgggtttttttttagttgccaacagttgtatgtttgctgattatttatgacctgaaataatatatttcttcttctaagaagacattttgttacataaggatgacttttttatacaatggaataaattatggcatttctattg

SEQ ID NO: 446 - DNA, 3427 bp, Homo sapiens
gctcgcgcacggctccgcggtcccttttgcctgtccagccggccgcctgtccctgctccctccctccgtgagtgtccgggttcccttcgcccagctctcccacccctacccgaccccggcgcccgggctcccagagggaactgcacttcggcagagttgaatgaatgaagagagacgcggagaactcctaaggaggagattggacaggctggactccccattgcttttctaaaaatcttggaaactttgtccttcattgaattacgacactgtccacctttaatttcctcgaaaacgcctgtaactcggctgaagccatgccttgtgttcaggcgcagtatgggtcctcgcctcaaggagccagccccgcttctcagagctacagttaccactcttcgggagaatacagctccgatttcttaactccagagtttgtcaagtttagcatggacctcaccaacactgaaatcactgccaccacttctctccccagcttcagtacctttatggacaactacagcacaggctacgacgtcaagccaccttgcttgtaccaaatgcccctgtccggacagcagtcctccattaaggtagaagacattcagatgcacaactaccagcaacacagccacctgcccccccagtctgaggagatgatgccgcactccgggtcggtttactacaagccctcctcgcccccgacgcccaccaccccgggcttccaggtgcagcacagccccatgtgggacgacccgggatctctccacaacttccaccagaactacgtggccactacgcacatgatcgagcagaggaaaacgccagtctcccgcctctccctcttctcctttaagcaatcgccccctggcaccccggtgtctagttgccagatgcgcttcgacgggcccctgcacgtccccatgaacccggagcccgccggcagccaccacgtggtggacgggcagaccttcgctgtgcccaaccccattcgcaagcccgcgtccatgggcttcccgggcctgcagatcggccacgcgtctcagctgctcgacacgcaggtgccctcaccgccgtcgcggggctccccctccaacgaggggctgtgcgctgtgtgtggggacaacgcggcctgccaacactacggcgtgcgcacctgtgagggctgcaaaggcttctttaagcgcacagtgcaaaaaaatgcaaaatacgtgtgtttagcaaataaaaactgcccagtggacaagcgtcgccggaatcgctgtcagtactgccgatttcagaagtgcctggctgttgggatggtcaaagaagtggttcgcacagacagtttaaaaggccggagaggtcgtttgccctcgaaaccgaagagcccacaggagccctctcccccttcgcccccggtgagtctgatcagtgccctcgtcagggcccatgtcgactccaacccggctatgaccagcctggactattccaggttccaggcgaaccctgactatcaaatgagtggagatgacacccagcatatccagcaattctatgatctcctgactggctccatggagatcatccggggctgggcagagaagatccctggcttcgcagacctgcccaaagccgaccaagacctgctttttgaatcagctttcttagaactgtttgtccttcgattagcatacaggtccaacccagtggagggtaaactcatcttttgcaatggggtggtcttgcacaggttgcaatgcgttcgtggctttggggaatggattgattccattgttgaattctcctccaacttgcagaatatgaacatcgacatttctgccttctcctgcattgctgccctggctatggtcacagagagacacgggctcaaggaacccaagagagtggaagaactgcaaaacaagattgtaaattgtctcaaagaccacgtgactttcaacaatggggggttgaaccgccccaattatttgtccaaactgttggggaagctcccagaacttcgtaccctttgcacacaggggctacagcgcattttctacctgaaattggaagacttggtgccaccgccagcaataattgacaaacttttcctggacactttacctttctaagacctcctcccaagcacttcaaaggaactggaatgataatggaaactgtcaagagggggcaagtcacatgggcagagatagccgtgtgagcagtctcagctcaagctgccccccatttctgtaaccctcctagcccccttgatccctaaagaaaacaaacaaacaaacaaaaactgttgctatttcctaacctgcaggcagaacctgaaagggcattttggctccggggcatcctggatttagaacatggactacacacaatacagtggtataaactttttattctcagtttaaaaatcagtttgttgttcagaagaaagattgctataaggtataatgggaaatgtttggccatgcttggttgttgcagttcagacaaatgtaacacacacacacatacacacacacacacacacagagacacatcttaaggggacccacaagtattgccctttaacaagacttcaaagttttctgctgtaaagaaagctgtaatatatagtaaaactaaatgttgcgtgggtggcatgagttgaagaaggcaaaggcttgtaaatttacccaatgcagtttggctttttaaattattttgtgcctatttatgaataaatattacaaattctaaaagataagtgtgtttgcaaaaaaaaagaaaataaatacataaaaaagggacaagcatgttgattctaggttgaaaatgttataggcacttgctacttcagtaatgtctatattatataaatagtatttcagacactatgtagtctgttagattttataaagattggtagttatctgagcttaaacattttctcaattgtaaaataggtgggcacaagtattacacatcagaaaatcctgacaaaagggacacatagtgtttgtaacaccgtccaacattccttgtttgtaagtgttgtatgtaccgttgatgttgataaaaagaaagtttatatcttgattattttgttgtctaaagctaaacaaaacttgcatgcagcagcttttgactgtttccagagtgcttataatatacataactccctggaaataactgagcactttgaattttttttatgtctaaaattgtcagttaatttattattttgtttgagtaagaattttaatattgccatattctgtagtatttttctttgtatatttctagtatggcacatgatatgagtcactgcctttttttctatggtgtatgacagttagagatgctgattttttttctgataaattctttctttgagaaagacaattttaatgtttacaacaataaaccatgtaaatgaaaaaaaaaa

SEQ ID NO: 447 - DNA, 2673 bp, Homo sapiens
tgtccttggaggtgaccagggccactgcaggcatggtgctagcagagctgtacgtctctgaccgagagggaagcgatgccacgggagatggaaccaaggagaaaccatttaaaacaggtctaaaggctttgatgacagtagggaaagaaccatttcctaccatttacgtagattcacaaaaagaaaatgagaggtggaatgttatttctaaatcacagttgaagaacattaaaaagatgtggcatagggaacaaatgaagagtgaatcccgggaaaagaaagaggcagaagatagtttacgaagagaaaagaacctggaagaagcaaagaagattaccattaaaaatgatccaagtctcccagagccaaaatgtgtgaagattggtgcgttagaaggatatagaggccaaagagtaaaggtgtttggctgggtccacaggctgcgcaggcaaggaaagaatttaatgtttctggtgttgcgagatggtacaggttatcttcagtgtgtcttggcggatgagttgtgtcagtgctacaatggagttctcttgtccacggagagcagtgttgcagtgtatggaatgctaaatcttaccccaaagggcaagcaggctccaggtggccatgagctgagttgtgacttctgggaactaattgggttggcccctgctggaggagctgacaacctgatcaatgaggagtctgacgttgatgtccagctcaacaacagacacatgatgatccgaggagaaaacatgtccaaaatcctaaaagcacgatccatggtcaccaggtgctttagagatcacttctttgatagggggtactatgaagttactcctccaacattagtgcaaacacaagtagaaggtggtgccacactcttcaagcttgactattttggggaagaggcatttttgactcaatcctctcagttgtacttggagacctgcctcccagccctgggagatgttttttgtattgctcagtcataccgggcagagcagtccagaacacgaaggcacctggctgagtacactcacgtggaagctgagtgtcctttcctgacttttgacgacctcctgaaccggttggaggacttggtttgtgatgtggtagatcgaatattgaagtcacctgcagggagcatagtgcatgagctcaacccgaactttcagccccccaaacggcctttcaaacggatgaactattcagatgctatcgtttggctaaaagaacatgatgtaaagaaagaagatggaactttctatgaatttggagaagatatcccagaagctcctgagagactgatgacagacaccattaatgaaccaatcttgctgtgtcgatttcctgtggagatcaagtccttctacatgcagcgatgtcctgaggattcccgtcttactgaatctgtcgacgtgttgatgcccaatgttggtgagattgtgggaggctcaatgcgtatctttgatagtgaagaaatactggcaggttataaaagggaagggattgaccccactccctattactggtatacggatcagagaaaatacggtacatgtccccatggaggatatggcttgggcttggaacgattcttaacgtggattctgaataggtatcacatccgagacgtgtgcttataccctcgatttgtccagcgttgcacgccataaccattttctccagaagcgtggaggaaagattatgaaaggaacaggctctttaaaaaagaaaacaaaaagccagaatcttccttttttttgtttcattggggtttctctttctgtttttctttctactaccataaaaactatctcaaatcacctgaacatcaagtgatattaaggttgtcatcttaagaaaaaatatccatttttttcttaagttcgggaaacaaagttcggggaaaatacctggcatgaaactgtagttagggatacatttcagcattttactcactttatccaagttattcattttattcaagttatatgtatgtataattcaacaattttagattatggtgtaagatactccagtaacttatctttctgtccttttaagtgtacctggaattctttgatttattttattgcatcaatgaattaaaacaaaaatcttgggggaagaaattggcaatatcgtataaaaatctgctcatattagaacacagtataattcagcagtaaacactagaatcaaatgaatagccttttgtatcagttattaatcttttctaactctgcttagctgctaataatcctgaggcatagaaattgaagaatttgtaaaaatagaattgccttaaaggatttgaagtaagaacataattttggggagagttttttagtgattcacagtatccctcttagcattaatttaaggtaaagaggcagattgattttccctctttcctggtaattcctaagtaattaagaataaataagttccaaaagaaattgtagctggaatcttaataacaattgtgagtggctgtttgagttgcccccaccatgtccttagatctaatctgtgctaccttattaactcacagcaggcttactgaatggcttcatttcagatttagttgatttctccaccaaatgcatgtcatgtattctcaataggctgtattcccagcagtcaataaatgaacacccgtaaaaa

SEQ ID NO: 448 - DNA, 1532 bp, Homo sapiens
gaattcgggccgccgccaggtcgctgttggtccacgccgcccgtcgcgccgcccgcccgctcagcgtccgccgccgccatgggagtgcaggtggaaaccatctccccaggagacgggcgcaccttccccaagcgcggccagacctgcgtggtgcactacaccgggatgcttgaagatggaaagaaatttgattcctcccgggacagaaacaagccctttaagtttatgctaggcaagcaggaggtgatccgaggctgggaagaaggggttgcccagatgagtgtgggtcagagagccaaactgactatatctccagattatgcctatggtgccactgggcacccaggcatcatcccaccacatgccactctcgtcttcgatgtggagcttctaaaactggaatgacaggaatggcctcctcccttagctccctgttcttggatctgccatggagggatctggtgcctccagacatgtgcacatgagtccatatggagcttttcctgatgttccactccactttgtatagacatctgccctgactgaatgtgttctgtcactcagctttgcttccgacacctctgtttcctcttcccctttctcctcgtatgtgtgtttacctaaactatatgccataaacctcaagttattcattttattttgttttcattttggggtgaagattcagtttcagtcttttggatataggtttccaattaagtacatggtcaagtattaacagcacaagtggtaggttaacattagaataggaattggtgttggggggggggtttgcaagaatattttattttaattttttggatgaaatttttatctattatatattaaacattcttgctgctgcgctgcaaagccatagcagatttgaggcgctgttgaggactgaattactctccaagttgagagatgtctttgggttaaattaaaagccctacctaaaactgaggtggggatggggagagcctttgcctccaccattcccacccaccctccccttaaaccctctgcctttgaaagtagatcatgttcactgcaatgctggacactacaggtatctgtccctgggccagcagggacctctgaagccttctttgtggccttttttttttttcatcctgtggtttttctaatggactttcaggaattttgtaatctcataactttccaagctccaccacttcctaaatcttaagaactttaattgacagtttcaattgaaggtgctgtttgtagacttaacacccagtgaaagcccagccatcatgacaaatccttgaatgttctcttaagaaaatgatgctggtcatcgcagcttcagcatctcctgttttttgatgcttggctccctctgctgatctcagtttcctggcttttcctccctcagccccttctcacccctttgctgtcctgtgtagtgatttggtgagaaatcgttgctgcacccttcccccagcaccatttatgagtctcaagttttattattgcaataaaagtgctttatgcccgaattc

SEQ ID NO: 449 - DNA, 865 bp, Homo sapiens
agacaagagccccatgtcctcactacagatctccaatgaaaagaacctggaacctggcaaacagatcagcagatcttcaggggagcagcaaaacaaaggacgcatagtgtcaccatcgttactgtcagaagaacccctggccccctccagcatagatgctgaaagcaatggagaacagcctgaggagctgaccctggaggaagaaagccctgtgtctcagctctttgagctagagattgaagctttgcccctggataccccttcctctgtggagacggacatttcctcttccaggaagcaatcagaggagcccttcaccactgtcttagagaatggagcaggcatggtctcttctacttccttcaatggaggcgtctctcctcacaactggggagattctggtcccccctgcaaaaaatctcggaaggagaagaagcaaacaggatcagggccattaggaaacagctatgtggaaaggcaaaggtcagtgcatgagaagaatgggaaaaagatatgtaccctgcccagcccaccttcccccttggcttccttggccccagttgctgattcctccacgagggtggactctcccagccatggcctggtgaccagctccctctgcatcccttctccagcccggctgtcccaaaccccccattcacagcctcctcggcctggtacttgcaagacaagtgtggccacacaatgcgatccagaagagatcatcgtgctctcagactctgattaactgcctccccttctccctgcctccagaatgttctgggataacatttggaggaaggtgggaagcagatgactgaggaagggatggactaagctaatccccttttggtggtgtttcttt

SEQ ID NO: 450 - DNA, 2617 bp, Homo sapiens
  misc_feature (2141)..(2141): n is a, c, g, or t
  misc_feature (2311)..(2311): n is a, c, g, or t
  misc_feature (2452)..(2452): n is a, c, g, or t
  misc_feature (2496)..(2496): n is a, c, g, or t
atgcaaccagacatgtccttgaatgtcattaagatgaaatccagtgacttcctggagagtgcagaactggacagcggaggctttgggaaggtgtctctgtgtttccacagaacccagggactcatgatcatgaaaacagtgtacaaggggcccaactgcattgagcacaacgaggccctcttggaggaggcgaagatgatgaacagactgagacacagccgggtggtgaagctcctgggcgtcatcatagaggaagggaagtactccctggtgatggagtacatggagaagggcaacctgatgcacgtgctgaaagccgagatgagtactccgctttctgtaaaaggaaggataattttggaaatcattgaaggaatgtgctacttacatggaaaaggcgtgatacacaaggacctgaagcctgaaaatatccttgttgataatgacttccacattaagatcgcagacctcggccttgcctcctttaagatgtggagcaaactgaataatgaagagcacaatgagctgagggaagtggacggcaccgctaagaagaatggcggcaccctctactacatggcgcccgagcacctgaatgacgtcaacgcaaagcccacagagaagtcggatgtgtacagctttgctgtagtactctgggcgatatttgcaaataaggagccatatgaaaatgctatctgtgagcagcagttgataatgtgcataaaatctgggaacaggccagatgtggatgacatcactgagtactgcccaagagaaattatcagtctcatgaagctctgctgggaagcgaatccggaagctcggccgacatttcctggcattgaagaaaaatttaggcctttttatttaagtcaattagaagaaagtgtagaagaggacgtgaagagtttaaagaaagagtattcaaacgaaaatgcagttgtgaagagaatgcagtctcttcaacttgattgtgtggcagtaccttcaagccggtcaaattcagccacagaacagcctggttcactgcacagttcccagggacttgggatgggtcctgtggaggagtcctggtttgctccttccctggagcacccacaagaagagaatgagcccagcctgcagagtaaactccaagacgaagccaactaccatctttatggcagccgcatggacaggcagacgaaacagcagcccagacagaatgtggcttacaacagagaggaggaaaggagacgcagggtctcccatgacccttttgcacagcaaagaccttacgagaattttcagaatacagagggaaaaggcactgtttattccagtgcagccagtcatggtaatgcagtgcaccagccctcagggctcaccagccaacctcaagtactgtatcagaacaatggattatatagctcacatggctttggaacaagaccactggatccaggaacagcaggtcccagagtttggtacaggccaattccaagtcatatgcctagtctgcataatatcccagtgcctgagaccaactatctaggaaatacacccaccatgccattcagctccttgccaccaacagatgaatctataaaatataccatatacaatagtactggcattcagattggagcctacaattatatggagattggtgggacgagttcatcactactagacagcacaaatacgaacttcaaagaagagccagctgctaagtaccaagctatctttgataataccactagtctgacggataaacacctggacccaatcagggaaaatctgggaaagcactggaaaaactgtgcccgtaaactgggcttcacacagtctcagattgatgaaattgaccatgactatgagcgagatggactgaaagaaaaggtttaccagatgctccaaaagtgggtgatgagggaaggcataaagggagccacggtggggaagctggcccaggcgctccaccagtgttccaggatcgaccttctgagcagcttgatttacgtcagccagaactaaccctggatgggctacggcagctgaagtggacgcctcacttagcggataaccccagaaagttggctgcctcagagcattcagaattctgtcctcactgataggggttctgtgtctgcagaaatttngtttcctgtacttcatagctggagaatggggaaagaaatctgcagcaaaggggtctcactctgttgccaggctggtctcaaacttctggactcaagtgatcctcccgcctcggccttccaaagtgctgggatatcaggcactgagccactgcgcccagtcaacaatccgntctgaggaaagcgtaagcaggaagacctcttaatggcatagcaccaataaaaaaatgactcctagttgtgtttggaaagggagagaagagatgtctgaggaaggtcatgttctttcagcttatggcatttcctagagtttngttgaagcaagaagaaaaactcagagaatataaaatcaactttnaaaattgtgtgctctcttcttcacgtaggctcctgttaaaaacaaagtgcagtcagattctaagccctgttcagagacttcgcggatcacagctgcagctcaccgccacatcacaggatcc

SEQ ID NO: 451 - DNA, 1021 bp, Homo sapiens
gaaggccggctgcctgaggaataccagtgggcaagagaattagcatttctggagcatctgctgtctgagcagcccctgggtgcgtccactttctgggcacgtgaggttgggccttggccgcctgagcccttgagttggtcacttgaaccttgggaatattgagattatattctcctgccttttaaaaagatggacttcagcagaaatctttatgatattggggaacaactggacagtgaagatctggcctccctcaagttcctgagcctggactacattccgcaaaggaagcaagaacccatcaaggatgccttgatgttattccagagactccaggaaaagagaatgttggaggaaagcaatctgtccttcctgaaggagctgctcttccgaattaatagactggatttgctgattacctacctaaacactagaaaggaggagatggaaagggaacttcagacaccaggcagggctcaaatttctgcctacagggtcatgctctatcagatttcagaagaagtgagcagatcagaattgaggtcttttaagtttcttttgcaagaggaaatctccaaatgcaaactggatgatgacatgaacctgctggatattttcatagagatggagaagagggtcatcctgggagaaggaaagttggacatcctgaaaagagtctgtgcccaaatcaacaagagcctgctgaagataatcaacgactatgaagaattcagcaaagagagaagcagcagccttgaaggaagtcctgatgaattttcaaatgactttggacaaagtttaccaaatgaaaagcaaacctcggggatactgtctgatcatcaacaatcacaattttgcaaaagcacgggagaaagtgcccaaacttcacagcattagggacaggaatggaacacacttggatgcagggtttgagaatgtttttagctggtggcaataaatattagaagcctgcagaatccagctacgaatatagagggttttgctcttgggccttcgtggc

SEQ ID NO: 452 - DNA, 6769 bp, Homo sapiens
ccgggccgggcggcgcgctgcccacttgcccagcctgccacaagatcactccaagaactgaggcccctgtcagcagtgtcagtaatagtttggagaatgccctgcacacatcagcacattccacggaggagtcgctgcccaagaggcccttaggaaaacacagcaaagtgagtgttgaaaagatagacctgaagggattatcacacacaaaaaatgacagaaatgttgaatgttcctttgaggtcttgtggtctgattcttcaataacatcagtaaccaaatcttcctctgaagtgacggaatttatttcaaagctatgtcagctctatcctgaagagaacttggagaaactcattccttgcttagctggtccggacgcattttatgtggagcgaaaccacgtggatctggactcaggcctgaggtacctggcctcattaccttctcacgtgttgaaaaatgaccatgtcaggaggtttctcagcacttcctctcccccacagcagcttcagagtccaagtcctggcaatccctccctttctaaagtaggtaccgtgatgggcgtgtctggaaggcctgtgtgtggagtggctggtatcccgtcctcgcagagcggagcccagcaccacgggcagcacccggccggctccgccgcccccttgcctcactgctcccatgcgggcagcgcgggctcagccctggcctaccggacccagatggacacatcacctgccatcctcatgccttccagtctgcagacccctcagacccaggagcagaatgggattctagactggcttaggaaactgcgtttgcacaagtattaccccgtctttaagcagctctccatggagaagtttttgagccttactgaagaagatctgaataaatttgagtctcttaccatgggggcaaagaagaagctcaagacccagctggagctggaaaaggagaagtcagagagacggtgcctgaacccctcggccccgccgctggtcaccagcagtggtgtggctcgagtgccccccaccagccacgtcgggcccgtgcagtcggggcggggcagccatgcagcagagctgcgggtggaagtggagcagccccatcaccagctgccccgggaaggcagttcctcggagtactccagctcctcctccagccccatgggggtacaggcccgggaagagagctccgacagcgctgaggagaatgacagacgtgtggagattcacttggagagctctgacaaggagaagccggtgatgctgctgaatcacttcacttccagttccgccagacccacggcccaggttctccctgtgcagaatgaggccagctccaatccatcaggccaccaccccctgcccccgcagatgctgagcgcagcctcacacatcacacccatccgcatgctgaattccgtgcacaagccagaaagagggagcgcggacatgaagctcctctcgtcttctgtgcactcacttttgtctctagaagaaaggaataaaggatctggaccaagaagcagcatgaaagtggacaagagctttggcagcgccatgatggacgtgctgcccgcgtccgcaccccaccagcctgtgcaggtcctctctgggctttcggagagcagctccatgtcacccacagtctcctttggtccccggaccaaagtcgtgcatgcatccacgctggacagggtgctgaagacagcacagcaaccggccctggtcgtggagaccagcacggccgccacggggacgcccagcacagtcctccacgccgcccgtccgcccatcaaactgctgctgtcgtcatctgttcctgctgattctgccatttctgggcaaacttcctgtcctaataatgtgcaaataagtgtgccccctgcaataataaacccccggactgctctgtacacagccaacaccaaagttgccttttctgcaatgagcagtatgccagtgggccccctgcagggtggcttctgtgcaaacagtaacactgcctctcccagcagccacccctccacgtcctttgccaacatggccacgttgcccagctgcccagcccccagctccagcccggcgctgtcctccgtccctgaaagcagtttctatagcagcagtggcggtggcggctccacaggaaacattcctgcctcgaatccgaaccaccaccaccaccaccaccatcagcagcccccggcacccccgcagcccgccccacccccgccaggctgcattgtgtgcacgtcctgtggctgcagcggcagctgcggctcgagtggcctgactgtcagctacgccaactacttccagcacccgttctccggtccgtccgtgttcaccttccccttcttgcccttcagtcccatgtgcagcagcggctacgtcagcgcccagcagtacggcggcggctccaccttccccgtcgtgcacgccccttacagcagcagcgggaccccagaccctgtcctgagtgggcagtccacgtttgccgtgccacccatgcagaacttcatggcagggacagcaggggtgtaccagacccaaggactggtgggcagtagcaatggttccagtcacaaaaagagcgggaacctatcttgttacaactgcggggccactggtcaccgcgcccaggactgcaaacagccgtccatggacttcaaccggccaggtacttttaggttgaaatacgcccctccagcagaaagtctggactccacagattgatatttttctctggcaacagaacgttattaagccatggagacataaggaaaattaaatacaaaactgagaagtctagttgctgttgagcttaatctttttaatccaaaggtgctttacttttcctagactggatagaaaatctagcgtagaagtgcatcaaactcgatttattgccaaaaccctagattggagcttggtgtcagaactcgcctagtgggcatctctgtggctggtgagatcggccacctccacttttggttgcagtgcagagacgccatgtctcccgaagagcattgccatcactggccctcctaggctcacacgtcaattccagggcagctacacgtggtctgaatcgagaaccgagcttggagttctccaagtggagttccacccgccggactcctgacacccctgggctagggaaaatgtcgactttgttttgttctgttcctaaagtgattagcactaatctctgggatttttaaggattgcactacagaagaatgtaccctgatgtaaatctctgcggttctgggagccaaactcctctgagaacagtcagtgcaagagactccaataatccatattgaaagagtcagcaccagcagaggctactcgacttaggacgcaacagaggttttagtatttccttccctcctccaagcacttgtagcagtttcaggtttttaatttttttctgcaaataaatctaaactacgttattaaatagaaatagtttactcgcaacaacttaatttctaagggtccaagtcccagagaatccatagtcgtcaaagctttgagagtatctttcttcccagccagtcagtggctttgagccctatcttccactacaaatgacctctcgaggggggacggcgacagcgcggctctgtgagtggctgtgaggatgctgcacgtcctcagcagagtttgcaagttgctttatctcccacgggctccccaagaacctccaaccccgaggcttatcgctagcggattcacacctgagacagacatttcaacaatgatacagtcctgtcatttatcagcaaaagattgggaattttctcctgtcaacttcttttgtattaggctgtgtattgatagttaattccgttaaaaattacttggaaaacagtgggaagtggtaggactctggaagaggccacacacccgagagctgcgagatctgtgcaagtctggttttggttaggtagtaataaaagtcctcactgtagatctctaaatttcaacccacggaaatgaaagccttttgtctgaaatttacggacttaaatcttcaaggttaaagggaattttctgctcaaataatactcttatcgaaaatgctaaagtcttcaatgttaaaatactgattggtaaaatcttgcagttgggattttgcagttggatatttattttaaaaaaaattataatattcagactattcttaaaatgggacaatcagcctcatgaaaaattgatgtaaatcagaagaataccctagaatgaggccttgtgatgtgagcgttcaatttgaagagcagttcctaacttcatagaaactaaagcagaaagttgttacattttttttatgacaggcttttagtagaattttttagttttattttagttgaattttatttctatgcaatgcagaattaacagacctcttctcctcatggtacacagtattacagtgttgaagtaatggtgatgcttattacaacagctatttaggggaatgttacgttgatctcttaaattgtaaacactacaaaatgtcaaaataatgagaactgacacaactttgccttaaagagtactagactggaccttctcatattacgtttaaggaagacttagagtgttcattgatgtttacgattttaatatttctgaaggccattacagtggcctggatatgtgctgaaagccaaacttttaaattttttggtttttttaagcaaagaaatattttaaataaatcctatttcaacactgaaattgttgaaaaccgtctcataacaaaaggaaaaaacattggaatttttgttttagtggtcagtataggggaatgaaagcgtctgttgttacccacgtaactattttgataagtattagaggttaaccttaaatccagcaaaacattaaaacagaaacttttcaacttggagcctgccattcagcgttgaggtagatgagttccgacactgtcacggctgtgttcccagcagcgaaggcctctgcggagctgccagtcgtcttgaacgtgcatgggcggcgtgtgacatctccagggaggccgtccgaagtcgagaatcgtcagctgtaagtaggagctacacagcgcagagaaaatggaaccacccatccgtgaggcctctttccggagggagccgcacacttggacttgagagtttgccagcagcgagctcggatgcatctctccaaaagccaccaaggtcggcgcgtctgaagagcgttttgcggtcatcagacttcctcatctgaaaacacagaacatactgaccctttcaagtacttagtcattttcctgaaagtgtggtctgtttcagaatgctgtggcaaccaggtaggtgtggcactggccatgtgccacgtctttgccctttgtagtctgtcagatattaaagtttctaaccctgtttttttaatctccaagaatggggaaagtggaatgtagagatggaagcagaacgtgatgtttggatacaacagctatttaatccttttttattttttaagcaaaacactcagttttctaccttattttctaatgttgatttcatggtaatactgacagttgggagtgtttaacataaaaactcattgctaaagagcactgaggaaatgggagctagcgcacttgtaataaaaataaagacaaaatattttcttgaatgcatatatgtgattgggtattttaaaaaccagtatcatctgtcatctccaaaagattacaggagtcagcttgttaatacagtagtgttagtaggttctgtatttttaattcagtacttagaattctaggtcctttattgcccaaagtcagcacagttagtttataccacagactctgtcttggggcacagtagtggggcggggtagtgactttgcctaaacatcacccagctggaacagaggctgagcgggggctttaggcacttgccagatgggaactgggttgcaccctccttgctccctgtcattttcttgtcactcttcctgcttcccagtgttttattttatgccttgctcgttgtacatcatgatgactgatggtcttcaaggttgtgaggaaagccgtctccctgcttgactcgactgctgtcccagaggagagtcctgtgcgacctgagcgggggtggctgccatttccagcatgcaggtgacttccaaagaatgagtcaggtggcactgaaagccatgggttctgaagaggcgaatttgttgaaaagtcccaagggtctgaatgaaagcatctttaatcaacactcaacactcgcaatattctagaaaaccatatactgtgctggttgaggccaaaggttaacattgctccactgttcaccaaggaagggggcagtggccatccgccgcggcctcacgtgcgttgtaacaagccctcatcacatgtgtgagtcttacgtgcacaaaaagagaaggctttggtactgaaactggacaccttgtgtactcgataccttcacagcttctattggacatattttctttttaggaatgaaggaaaattctcccatttttgagccattcttttgtcaattctacaaaattgcatgtaactttataaatatttttaaaagatatagttttgtaaatatttaatattccgctaatttgattttgaattgtaaatgtcaagtattctgtttttggggtttttatgttttattatactttgttaaaaaggacaaattgtacatttttagaatgtttttatgagtaaatttaatgtactgaaaataaaaattttaaaaaagaac

SEQ ID NO: 453 - DNA, 3319 bp, Homo sapiens
ggcccggcccgcggcggcggcaaaggggcggaggggttcgctgccagcaattgccaagctgctgcggtcgtggcgggatggtatagccgggcctgagggcgggcggcggggcgcgggcgggggcgaggcggccgggaagggccgacgccgcctgactggcttgggagcagcggcagcaagctgagggggcgtcgccgccgccggcccccggcgccgccgcgggaggccgcgcccgccatggcggcccgggcggtgctggacgagttcactgcgccagctgagaaggcggagctgctggagcagagccgcggccgtatcgagggcctgtttggcgtgagcctagccgtgctcggcgcgctaggggctgaggagccgctgcccgcgcgcatctggctgcagctctgcggggcgcaggaggcggagcacagcgccaaggaatatattaaaggaatctgtgaacctgaactagaagaaagagaatgttaccccaaggacatgcactgcatttttgttggggcagagagcctgtttctgaaaagcttgattcaggatacttgtgctgacctctgcattctggacattggccttcttggcatcagaggaagtgctgaggctgtggtcatggctaggagtcacattcaacaatttgtaaagctctttgaaaataaagagaacctacccagtagtcagaaagaatcagaggtgaaaagggaattcaaacaatttgttgaagcccatgcagacaattacacaatggatttgttgattttgcccacttccttgaaaaaagaacttttgacactcacacaaggtgaggagaatctctttgaaacaggagatgatgaggttattgaaatgagagattctcaacaaacagagtttacacagaatgctgccacagggctgaatatttctagagatgaaactgttttgcaggaagaggcaagaaataaagctgggactcctgtttctgagcttacaaaacaaatggacacagtcctttctagctcaccagatgtgctttttgatccaataaatggtctaaccccagatgaagaggcactttccaatgagagaatttgtcagaaaaggagattttctgattctgaagaaaggcatacgaagaagcagttttctttggaaaatgttcaggagggggagattttacacgatgctaagacattggctggaaatgtaatagctgacctatctgattcttctgctgattctgaaaatttaagtccagatataaaagaaactactgaggaaatggaatacaacatcctcgtaaacttttttaaaaccatgggctactcccaagaaattgttgaaaaggtcattaaggtgtatggaccatctactgaaccattattgctcttagaggaaattgaaaaagaaaataaaagattccaagaagacagagaattttcagctggtacagtgtatccagagaccaacaaaaccaaaaataaaggtgtttatagcagcacaaatgagcttacaactgattccactccaaagaaaacacaggctcacacacagcaaaatatggtagaaaaattttctcagttaccattcaaagtggaagctaaaccatgtacctcaaattgtagaattaatactttcagaacagtgccaatagaacagaaacatgaagtctggggttcaaaccagaactacatttgtaacacagaccctgaaactgatggcctttcaccttctgttgcctctccaagtcccaaagaagtcaattttgtttcaaggggagcttcaagtcaccagcccagagttccactttttcctgaaaatggtttacaccagcagccagaacccttgcttccaaataatatgaaatctgcctgtgaaaaacgtttaggatgttgtagttctcctcattctaagccaaattgctcaaccctttctccaccaatgccactgccccagctgttaccttcggttactgatgcaaggtcggcaggaccttctgatcatattgattcctcagttactggggttcaaaggtttcgagatactctaaaaataccctacaagctggaattaaaaaatgaaccagggagaacggatttgaaacacattgttatagatgggagcaatgttgcaattacccatggtctgaaaaagttcttttcttgtcgtggaattgcaattgcagttgaatatttttggaagcttggcaacagaaacatcactgtatttgtccctcagtggagaacaaggcgtgatcctaatgtcacagaacagcacttcttaacccagctccaggagctcggaatattatctttaactcctgcccggatggtctttggagaaagaattgcttctcatgatgacaggtttctactacacttagcggacaaaactggtggcataattgtgacaaatgataatttcagagaatttgtgaatgagtcagtctcttggagagaaattattacaaaaaggctgctgcagtacacgttcgtgggggacatatttatggttcccgatgatcctctgggaagaagtggacctcgattagaggagtttcttcagaaggaagtctgtcttagagatatgcagcccctactcagtgccctgccaaatgtgggcatgtttgaccccagcttcagagtccctggcacccaggcagccagcaccagccaccagcctccgacccggattcagggagccccttcaagccactggctccctcagcagccccacttcccactgctgccagccctccccagtctccagcagaacctgcccatgccagctcagagatcttctgcagaaaccaacgagctgagggaagcccttctgaagatcttccctgactcagagcaaagactgaaaatagaccagatcttggtggcccacccatacatgaaagatctaaatgcgctttctgccatggtgttggattgaagattgtgctgagcgctgagcttgcgctcagggctggctgatcaaactcaagctcacacctgtacctgatgggaatgaacataatgtgaagaaacttatttcccagtgtaaacgcagttgtacagaaaaaaaatgttttgggtataaatctgggttttcaaaaccagcttttttctatatataaattatgctgctattacagatttaacattttctgttaaaggaaagtctacattttctgcctgttcagaactgtttaatagcagttactcttgagtgtatttacctttttatgttttttaaactattttccttaaagccgaaaatattgacaaatggatatggttagcctttataaataaataaaaaaaaaagtgttgctttcttaagg

SEQ ID NO: 454 - DNA, 6329 bp, Homo sapiens
ggagtacgcgcggctggtgatggaggcgcagccggagtggctgcgcgccgaggtgaagcggctgtcccacgagctggccgagaccacgcgtgagaagatccaggcggccgagtacgggctggcggtgctcgaggagaagcaccagctcaagctgcagttcgaggagctcgaggtggactatgaggctatccgcagcgagatggagcagctcaaggaggcctttggacaagcacacacaaaccacaagaaggtggctgctgacggagagagccgggaggagagcctgatccaggagtcggcctccaaggagcagtactacgtgcggaaggtgctagagctgcagacggagctgaagcagttgcgcaatgtcctcaccaacacgcagtcggagaatgagcgcctggcctctgtggcccaggagctgaaggagatcaaccagaatgtggagatccagcgtggccgcctgcgggatgacatcaaggagtacaaattccgggaagctcgtctgctgcaggactactcggaactggaggaggagaacatcagcctgcagaagcaagtgtctgtgctcagacagaaccaggtggagtttgagggcctcaagcatgagatcaagcgtctggaggaggagaccgagtacctcaacagccagctggaggatgccatccgcctcaaggagatctcagagcggcagctggaggaggcgctggagaccctgaagacggagcgcgaacagaagaacagcctgcgcaaggagctgtcacactacatgagcatcaatgactccttctacaccagccacctgcatgtctcgctggatggcctcaagttcagtgacgatgctgccgagcccaacaacgatgccgaggccctggtcaatggctttgagcacggcggcctggccaagctgccactggacaacaagacctccacgcccaagaaggagggcctcgcaccgccctcccccagcctcgtctccgacctactcagtgagctcaacatctctgagatccagaagctgaagcagcagctgatgcagatggagcgggaaaaggcgggcctgctggcaacgctgcaggacacacagaagcagctggagcacacgcggggctccctgtcagaacagcaggagaaggtgacccgcctcacagagaatctgagtgccctgcggcgcctgcaggccagcaaggagcggcagacagccctggacaacgagaaggaccgtgacagccatgaggatggggactactacgaggtggacatcaacgggcctgagatcttggcctgcaagtaccatgtggctgtggctgaggctggcgagctccgcgagcagctcaaggcactgcgcagcacgcacgaggctcgtgaggcccagcacgccgaggagaagggccgctatgaggctgagggccaggcactcacggagaaggtctccctgctagagaaggccagccgccaggaccgcgagctgctggcccggctggagaaggagctaaagaaggtgagcgacgtcgccggcgagacacagggcagcctgagtgtggcccaggatgagctggtgaccttcagtgaggagctggccaatctctaccaccacgtgtgcatgtgcaacaatgagacacccaaccgtgtcatgctggactactaccgcgagggccagggcggggccggccgcaccagtcccgggggccgcaccagccccgaggcgcgtggccggcgctcacccatcctcctacccaaggggctgctggctcctgaggcgggccgagcagatggtgggacgggggacagcagcccctcgcctggctcctcactgccatcacccctgagtgacccacgccgggagcccatgaacatctacaacctgatcgctatcatccgtgaccagatcaagcacctgcaggcagccgtggaccgcaccacggagctgtcacgccagcgcattgcctctcaggagctgggccccgccgtggacaaggacaaggaagcgcttatggaggagatcctcaagctgaagtcgctgctcagcaccaagcgggagcagatcaccacgctgcgcactgtgctcaaggccaacaagcagacggccgaggtggcccttgccaacctgaagagcaagtatgagaatgagaaggccatggttaccgagaccatgatgaagctgcgcaatgagctcaaggccctcaaggaggacgcagccaccttctcctcgctgcgtgctatgtttgccaccaggtgtgacgagtacattacacagctggatgagatgcagcggcagctggcggctgctgaggacgagaagaagacgctgaactcgctgctgcgcatggccatccagcagaagctggcgctgacccagcggctggagctgctcgagctggaccatgagcagacccggcgtggccgtgccaaagccgccccgaagaccaagccagccacaccgagcgtaagtcacacctgtgcctgtgccagcgacagggccgagggcaccgggctggccaaccaggtgttctgcagcgagaagcacagcatttactgtgattaggggctgtggggcgccgcacgctgcagctaacatctgcttcacctcaactaacccagcagcagcgggacggcggtgctaggtcaatcttaacgtgactaatgcacagagggtaggagtctagccgaggcgccatggggcgttgcatcagcaggacacttgtgagagctttgtgtcgcttctcactcctcaaagccccctcaggagcacccagtcctcagctgctctcttaggtgggggtcagaggtggggatagagctgcacattcttgcagcagatgtgtgatgaaagcatcttctaagccctgcgcacccgtggggaaacccaagggaggagtcctggtcctgctccctcagcacccaaaaggggcagaacctgagttgagacttgcatgttcctcgcatgtgtctaatgtcagcactagaaagcagttttaggaggttccagcctgcagcataggtacgacctcagaggatggctctgcacttggcatagtttcatggaaaggagtacgttgtagtttatgcagtatctgactgcaaatcatattcaggaaagaagtgcagaatttcttccccaagcccagagaagagcagccctgagcccctgtattctgctggccagacacacatggcacagacacagctgaccataacccaggaatccagagctcggtttctcatttctgagatcaggatgcttgtatagtggcctgtgaggtgacagattggcagggcccaaggccccaggttttcatttttcatgagaaaagctttccaagtgcctggccagaccttggtccttagtgcagagcccgtccttttgtacttggggtgaccccagcagccaattatccggccttccatagggggttcagtcccaaagacatggggctttgaaaaccctagcctgaagtctgagccaccaagggcttggctgggttggacacccacaggtgtatccagagcccagcccggtgctgggaaagctttgcatacggccagggccacttgtcaggattcacaggtaggagatgtttaggtctctttatttagtgcaatctgggggatggcaacagagaaagaggaaaggtagctgtagggttctcccatttccagaggctccatccacacctgccttcccacattctgagcagaacttttctcagtacttttttcccgatcaccctgtgggaccagctggacctgaggctgcagtcttctctcctgcaggctgcttgccttgtctctcatgcggaagaggcattcgagttacctggtgagagaccgtgttgccccctcccacagctctctgccctgcgcgttcttccctttggtgccgagtatgtttcggtcccctccagactccaggacacgcccatgtatgtcccctgcgtgttcatcctgggcccagatccccctgccccagcaagactcgcagtgggatggctgctggcatgcccaccctgcatgcgctttgccctctccttgcaagcctggcacatagcttctctccatactcctaagggactttgcagacacccaagccactgggacccctgctaacacatgcaggtcttctcttctgccaactaacgtgctcgcgccctcccagcacgtggagagcttcaattgtcagataaacaggaagcgacagatgaccgctttctaacgctctcttttctcccgttttcagctgtagagtagctgccaggaggacttggccacccggccctgtcacactgcagccccttccccttccctctcgtggcccacaaggaggaaggaagggcaacctaaaagcccacttagaaactttttggatatgccactgcaattcttttcaaaatagcattccccaggtttttaatgggaggaaaaaaagctttaatgttgagcatgctgcgagctgctgcgtggaaaggcctctgtatgggccgaagacccttcttccctggctgccaggctcgccaggagcccactggaaacgcccaccacgggggctccttgttacacatgttctttttttatccgatcaacctgtgcacttttgatattttgatattatatttgcttccttaattcctcgcgtagagacggtctcaggtgccgtggtctatgctcgtggtcctgtagctgtccgcctcagctcccaccgtgtttgtctggtgtcagcacgaggcagagctgtgtgctccatagcgtgtagctttagactcggagatgagtgctttgacccagcgaggagctcagctaagtgtatccacgctgtggttcagcagcctttagatcatacggcattgtggttcatgtttgaaattacagattttaaatgccatgttcattaagaaatccagggtattcagattctggggtttttcatattgtattattattattcttaggaatagttcaatgtaacaagaagaaaacttgacctttgctctggttaaaacagtaataggcacttgaaaaaaaaaagataaattattgaatgagtagtattacctacaaattccagaattttctgggttttaggacgttgtgaagcatgactgattaacagaattttatacaactgtaccaataaaattccaaattggaattgttttgttactctggttgttgtgccaaattgtggtacacttagaaaattctacagtcgtcgatttttagggtgttctctttcaacacctttttgttagtaatcattgccagtagtgccttcatcagttaagggaggtgtcccagcacagatcattctcaaaagcgagcagggaagagctagtgggcatgctgaaggccagcgtggacagcaggtgaggcaggtgctcctcacacccagacctgggcatcttcattgagggaaagaaaacagtcattgtgcaaaattctgttagtcagtgattctttacttgcaaattcaggggcttagaaaatgaaagcaaacacaaaaccttgagtgtgctttgggaaccaaatggaccttctgggacaagctgagcaagctgtatgaacgccacgtttgtgaagagctgagggtatcaggagggccgacgctgtgttggcatgcgcagtaggggatgagggttagccatagtattctttgcaaatgtgaaagcgagacattatatcttctcttgcttggtgtaactaatcactgttaatttcaggaaacagaactcattaaaactccttagcaaaccaggtctacatcctgttttgtttgctgagtgaggttagtgggagtggtcaaattggtactcttggaggaagaaaaactgtccttccttctccaaaaaaggaaaaattataataatataaatgacaaaaataaaagaattctgtttcctggaataagcatttcttattcctagttgtagggactcctatttttaccttccgttacagtgttgattcataagaaatattgttacatttgagataacttcatctgtatggggtatttatttgcaatgatgtctgagtactgtattttttctgtgcattaccttagtgtcagaatgttggtctttattttaaagtcatatgcatgttctcctgccaaggaacctttacacagacccaaacaaaaaaataataatcaaatgccttcaatttctgagaaaatgaggcagagcatggaaaaggaataggaaggagaaattaattgagattttcaggacacagacatatgatgtgaatgcctacaaagccagtgtgcataggaacagtgggcctgggtaaagagtcacattggtaggaccaataaagaataataaaaagac

SEQ ID NO: 455 - DNA, 3740 bp, Homo sapiens
cgctgggatggccgccacagctgtaggtgctgctagtgtttagcgctggtctttgccgggcgttgagggcagctcagcctccttgtttgtccggttcgcctgtgcgtggtactcaagggcaccagtattcccgcggtcggcagcatgggtcgggagtcacgccactatcgaaaacgatcggcatcccggggtcgctctggaagtcggtctagaagtcgctcaccctcagacaaaagaagtaaacgtggagatgacagacggtctagaagtagagatagagataggaggagagagaggtctcgtagcagggataaaagaagatctcggtcaagggacaggaagcgtctgagacgttccagaagtagagagagagacagaagccgagagcgaagaagatctcgaagtagagacaggagacgctcaaggagtagaagccggggccggcgatcccgatcctccagtcctggaaataaaagcaagaaaactgagaatagatctaggtccaaagagaaaactgatggtggggaaagttctaaagagaagaaaaaagacaaagatgacaaggaggatgaaaaagaaaaagatgctggcaactttgaccagaataagctggaagaagaaatgagaaagcgaaaagaaagagtagaaaaatggcgagaagagcaacgtaaaaaggctatggaaaacataggagaactgaaaaaggaaatcgaagagatgaaacaagggaaaaagtggagtttagaggacgatgatgatgacgaagatgatcctgcagaagctgaaaaggagggaaatgaaatggagggtgaggagttagatccattagatgcttacatggaagaagtgaaagaggaagtaaaaaaatttaacatgagaagtgtaaaaggtggtgggggaaatgaaaagaagtctgggccaacggtcacaaaagttgtcactgttgtgacaaccaaaaaagcagttgtggattctgataagaagaaaggtgagctgatggagaatgaccaggatgccatggagtattcttcagaggaggaagaagttgatcttcagacagcccttacagggtatcaaacaaaacagcgaaagcttctagaaccagttgatcatggaaaaattgagtatgagccatttaggaaaaacttctatgttgaagttccagaactagcaaaaatgtctcaagaagaggtaaatgtgtttcgattggaaatggagggcattacagttaaaggaaaaggttgccccaaaccaattaaatcctgggtccagtgtggaatttccatgaagatcttaaattccctcaagaagcatggctatgaaaagcccacgcccatccaaacccaagctattcctgctataatgtctggacgagatttgattggcattgccaaaacaggaagtggaaagaccattgcttttctgttgcccatgtttagacacatcatggatcagaggtcattagaggaaggagaggggccaatagctgtcatcatgactccaactcgagaactggctttacagattactaaagagtgtaagaagttttccaagactttgggacttagagtggtctgtgtttacggaggaacaggaatcagtgagcagattgctgagctgaaaagaggtgctgaaattattgtttgcacacctggtcgaatgattgacatgttagccgctaacagtggtcgggtcacaaatcttcgaagagtgacatatgttgttttagatgaagcagacagaatgtttgacatgggttttgaaccccaggtcatgcgcatcgtggataatgttcgtcctgatcgacagacggttatgttttcagctactttccccagagctatggaggctttggctcgcaggatcctcagtaaacctattgaagtacaagttggaggcaggagtgtggtttgctcagatgtggagcaacaagtgattgtgattgaagaagaaaagaaattcttgaagttacttgagcttctaggccattatcaagagtcaggatctgtcattatatttgtggataagcaggaacatgctgatggtcttcttaaggatttaatgagagcatcttatccttgcatgtctcttcatggaggcattgatcaatatgacagagatagcatcataaatgactttaagaatgggacctgcaaacttcttgtggctacctctgttgctgcccgaggtctagatgtgaaacatctgattcttgtagtaaattatagctgccccaaccattatgaggattatgtacacagagcagggcggactggaagagcaggaaacaagggttatgcttatacttttatcacagaggatcaagctcgctatgctggtgacataattaaagctcttgaattgtcagggactgcagtacctcctgatttagagaaactgtggagtgatttcaaagatcagcagaaagctgaggggaaaataattaaaaagagtagtgggttctctggtaagggattcaagtttgatgaaacagaacaagctttggctaatgagaggaagaagttacaaaaagcagctcttggtctacaagattcagatgatgaggatgctgcagttgatattgatgagcaaattgaaagcatgtttaattcaaagaagagagtaaaggatatggctgctcctggaacatcaagtgttcctgctccaactgcaggaaatgctgagaaattagaaattgctaagagattggctcttagaatcaatgcccagaagaatttgggcatcgagtctcaggtagatgtgatgcagcaggccaccaatgcaattcttaggggtggcaccattctggctcccactgtttctgcaaaaaccattgcagaacaacttgctgaaaagatcaatgccaagctcaattatgtgccgttagagaaacaagaagaagagagacaggatggtggacagaatgaatcttttaagagatatgaagaagaattagagatcaatgacttcccacagactgctaggtggaaagttacctctaaggaagctctgcagagaatcagtgaatactctgaagccgcaattacaatcagaggaacctacttccctcctggcaaagaacccaaggaaggcgagcggaagatttacttggcaattgaaagtgccaatgaactggctgtgcagaaagcaaaggcagaaatcaccaggctcataaaagaagagctgatccggctgcaaaattcataccaaccaacaaataaaggaagatacaaagtcttatagacatccggaaaaaagatttttacctgtgctggtctatgatgtatgtggcagttgctgtctgcagtttacaatgtattgtaaatgaagattttttaaattctatcttgctgattttttttaaatataagaaactggtacttggtaaagaaatctgtccgtaagtacccccacaatcagtcaaactatatttaaagccagcctgttttcagagtatgatgtcctttaatgtaaactcaaatatcaatattttaaatgtccggataatattctagaggtttaaaaaatggaaatatttgaactttctattgaagacaataaagtacacaagtcgttaaggggctattcactttatcctgtactttcaatgaaattgtgatcatttcctaagaaaaggtaaaattcactatcatattttgtgtccccaccttgatgttacatgactctggaacaatatgaactggatttaagaatgttataatagaagtcttacaaaatgg

SEQ ID NO: 456 - DNA, 5047 bp, Homo sapiens
gctggatcctgcagtaaccacaacagcatcctctccctgcgccagggacctgccagccggagagatgactgattagatcagattagatccggagccccgctctgcagaagggggccccaggggcgggggaggaggaccccagctggcctgagctggggggaggggtgccttggggctcgcagagttagagctttccagcgcggggatcacacctcagaagccgccacaatgaaagacggaacacatttctacacccagtgactggccaggtcccagaggaaaacaaaaaatttgacttgaaaatatcgaccttggacatgtccaataaaacaggtgggaaacgcccggctaccaccaacagtgacatacccaaccacaacatggtgtccgaggtccctccagagcggcccagcgtccgggcaactcgcacagcccgcaaagccatcgcctttggcaagcgctcacactccatgaagcggaaccccaatgcacctgtcaccaaggcgggctggctcttcaaacaggccagctccggggttaagcagtggaacaagcgctggttcgtcctggtggatcgctgcctcttctactataaagatgagaaggaagagagtatcctgggcagcatccccctcctgagcttccgggtagccgcagtgcagccctcagacaacatcagccggaaacacacgtttaaggctgagcatgccggggtccgcacctacttcttcagtgccgagagccccgaggagcaagaggcctggatccaggccatgggggaggctgctcgagtacagatccctccagcccagaagtcagtgccccaagctgtgcggcacagccatgagaagccagactcggagaacgtcccacccagcaagcaccaccagcagccaccccacaacagcctccctaagcctgagccagaggccaagactcgaggggagggtgatggccgaggctgtgagaaggcagagagaaggcctgagaggccagaagtcaagaaagagcctccggtgaaagccaatggcctcccagctggaccggagccagcctcagagccgggcagcccttaccccgagggcccaagagtgccagggggtggggaacagcctgcccagcccaatggctggcagtaccactccccaagccggccagggagcacagctttcccgtctcaggatggagagactgggggacaccggcggagtttcccaccacgcaccaaccctgacaaaattgcccagcgcaagagctccatgaaccagcttcagcagtgggtgaatctgcgccggggggtacccccgcctgaagaccttcggagtccctctaggttctatcctgtgtctcgcagggtccctgagtactatggcccctactcctcccagtaccccgatgattatcagtactacccgccaggagtgcggccggagagcatctgttccatgccggcctatgatcggatcagcccgccctgggccctggaggacaagcgccatgccttccgcaatgggggtggccctgcctaccagctgcgagagtggaaggagcccgccagctacgggcggcaggatgccaccgtctggatcccaagcccctcccggcagccagtctattatgatgagctggatgccgcctctagctccctgcgccgcctgtccctgcagccccgctcccactctgtgccccgctcacccagccagggctcctacagccgtgcccgcatttactcccctgtccgctcacccagtgcccgttttgagcggctgccacctcgcagtgaggacatctatgctgaccctgctgcctatgtgatgaggcgatccatcagctcccccaaggtccctccatacccagaagtgttccgggacagcctccacacctacaagttaaacgagcaagacacagataagctgctgggaaaattgtgtgagcagaacaaggtggtgagggagcaggaccggctggtgcagcagctccgagctgagaaggagagcctggaaagtgccttgatggggacccaccaggagctggagatgtttggaagccagcccgcctacccagaaaagctgcgacacaaaaaggattcactgcagaaccagctcatcaacatccgcgtggagctgtctcaggcgaccacggccctgacaaacagcaccatagagtatgagcacctcgagtctgaggtctctgccctgcacgatgacctctgggagcagctcaatttggacacccagaatgaggtgctgaaccggcaaatccaaaaggagatctggaggatccaggacgtgatggaggggctgaggaagaacaacccctcccggggcacggacaccgccaagcacagaggaggacttggcccctcagccacctacagctccaacagcccggccagccccctcagctctgccagcctcaccagccccctgagccccttttcactggtgtcgggctctcaggggtcccccaccaagcctggctccaacgagcccaaggcaaactatgaacaaagcaagaaagacccccaccagacattgcccctggacacccccagagacatcagccttgtgcccaccaggcaagaggtagaggcagagaagcaggcagctctcaacaaagttggcgttgtgccccctcggacaaaatcgcccactgatgatgaggtgaccccatcagcagtggtaagaaggaatgccagtgggctcaccaatggactctcctcccaggaacgccccaagagtgctgtgtttcctggcgaggggaaggtcaagatgagcgtggaggagcagattgaccgaatgcggcggcaccagagtggctccatgaaggagaagcggaggagcctgcagctcccggccagcccggcccccgaccccagtccccggccagcctacaaagtggtgcgccgccaccgcagcatccacgaggtagacatctccaacctggaggcagccctgcgggcagaggagcctggcgggcatgcctacgagacaccccgggaggaaattgcccggcttcgcaaaatggagctagagccccagcattatgacgtggacatcaataaggagctctccactccagacaaagtcctcatccctgaacggtacattgacctggagcctgacactcccctgagccctgaggagttgaaggagaagcagaagaaggtggagaggatcaagacactcattgccaaatccagtatgcagaacgtggtgcccatcggcgagggggactctgtggacgtgccccaggactcagagagccagctgcaggagcaggagaagcggattgaaatctcctgcgccctggcgaccgaggcctcccgcaggggccgcatgctgtctgtgcaatgtgccaccccaagccctcccacctcccctgcttccccggctcctccagcaaaccccctgtcgtctgaatccccacggggcgccgacagcagctataccatgcgggtctgagctctgactgcaagccctggctgaggccaatgctgtgaagctccacagagccacattctgaagccgtcctctgcccacctgaggtcctggctccccaccctggccccctgcccctgcactcccatgggaatgccgcagggagccaggctggggccatgggctgctgccagaggaccgtggatacctcagtgtccacacacccaccatgcccagccctggagccatcactactcacaccgtggtcctgggccagggcctgagatgacagtggggagcaccatcctcattaatgtccaagtcacagggagcctcagccttgccctggctggggttgtggtgactccagtggaacattccctgatgggggacatgccgtggtggagaacacacctgtggctatcttatgtgaggactagaggtgaagaggagatggacactgcctctggagccagcctgacaccaaggacagcacttgtcatcatccctatcctcgtcagccccaccctgctgcctcagctggacccagggctttgacacaaacccagtgctttgcttatgggtgctcgctggggtccggtggagactgaccaccctgcttgagccaaagacaaggtgatgagagatggggagaggccattggctcccagagggaacagtgctggctgtggctagagaacagcaggtctgtgcagtgtctgagggcaggttgggaagggtagcagagagagagagacagaaagagagagagagagagagagagagagagagagagagagagagagatcctcagagtggaaggagggggaagcagcaggacacattggcaagtcaagcaggaaggagggagatggaaaggggatatcagattggtttcccccggtggagccttaggttagtgcccagtgcagtgccagactgtctcctctgctcctcccacctcatccctaggaggacccaccagtggagcacatgcagcctcagtggagatgcttggtgtggggatctgggtgaagggggttgagtagcgactgcctgggagatggctgttagtaggtctgcgcctggtgtctgcctcgccatcctggggtaaggggcagagagaaggacttgtcttatgtagggtgtggtcagccttggggccttacctacccagttccatgatatttcttgccctgttccccctggaatgtgcagtgggccagctgagagtacgccttgaggaggggggatgaggccttaatctgggaggcctatccccctatcccaggcatcccagacgaggactggctgaggctaggcgctctcatgatccacctgccccgggagggcagcggggaagacagagaaaagcaaacacattcctcctcagctccacccacctggagacgaatgtagccagagaggaggaaggagggaaactgaaaacaccgtggcccctcggccttctctctgctagagttgccgctcagaggcttcagcctgacttccagcggtcccaagaacacctactaattcctctccactccttcatggctgggacagttactggttcatatgcaagtaaagatgacaatttactcaac

SEQ ID NO: 457 - DNA, 5035 bp, Homo sapiens
tgctgatcgctcgtgccggtgcggccgttaaccgcccttgccggagccctaggctcaaaagcagccccttacccttcctgggcttcccccaacccctttcccggtctgccctggggcatgagcagcgatggccggctgcatccctgaggagaaaacttaccggcgcttcctggagctattcctgggcgagtttcgcggaccgtgcggcggcggcgagccggagccggaacccgaacccgaacccgaacccgaacccgaacccgagtccgagcccgagcccgaacctgaactggtagaagctgaggcggccgaggcttcggtagaggaacccggggaggaggcggccacggtagccgcgacggaggagggggaccaggagcaagacccggagcccgaggaggaggcggcggttgagggtgaggaggaggaggagggcgcggcgacggcggcggcagccccggggcactcggccgtgccgccgccgccgccccagctgccgcctttgcccccgctcccgcgaccgctgtcagagcgcatcacccgcgaggaggtggagggcgaaagcctggacctgtgcctgcagcagctctacaaatataattgcccttcctttttggctgctgctttagccagagccacatcagatgaagtccttcagagtgatctttctgcacattatatcccaaaggaaacggatggcacagaagggactgtggagattgagacagtgaaattggcccgttctgtcttcagcaaactacacgagatttgctgcagctgggtgaaagacttccccctccgcaggagaccccagctttattatgagacatcaatccatgccatcaaaaacatgcgcaggaaaatggaggacaaacatgtctgcattcctgactttaatatgctcttcaacctagaggaccaggaagaacaagcttactttgcagtgtttgatggccatgggggagtagatgctgctatttatgcctccattcacctccacgttaacttagtccgccaggagatgttcccccatgatcctgctgaggccctgtgcagggccttccgggtcactgatgagcggtttgtgcagaaagcagccagggagagcttaagatgtgggaccacaggagtggtgactttcatcagaggcaacatgctacatgtggcctgggtgggtgattcccaggttatgcttgtgagaaagggccaagctgttgaactaatgaagccacacaaaccagacagagaggatgaaaagcagagaattgaggcccttggaggttgcgtagtctggtttggtgcctggagggtgaatggaagtctgtcggtttccagagctattggagatgctgaacataagccatatatctgtggggatgcagattctgcctccactgttctggatgggaccgaagactacctcattctggcctgtgatggcttctatgacaccgtgaaccctgatgaggcagtgaaagttgtgtccgaccacctgaaagagaataatggagacagcagcatggttgcccacaaattagtggcatcagctcgtgatgctgggtcaagtgataacatcacggttattgtggtattcctgagggacatgaacaaagctgtaaatgttagtgaggaatcagattggacagagaactcttttcaaggagggcaagaagatggtggggatgataaggagaatcatggagagtgcaaacgcccttggcctcagcaccagtgctcagcaccagccgacctaggctatgatgggcgtgtggattcattcactgatagaactagcctgagcccagggtcccaaatcaacgtgctggaagacccaggctacctagatctcacacaaatagaagcaagcaaacctcacagtgcccagtttttgctaccagttgagatgtttggtcctggtgcaccaaagaaagcaaatcttattaatgagttaatgatggagaaaaaatcagttcagtcatcattgcctgaatggagtggtgctggagagtttcccactgctttcaatttgggttcaacaggggagcagatatacagaatgcagagcttgtctcctgtctgttcagggttggaaaatgaacagttcaaatccccgggaaacagagtttctagattgtctcatttacgccaccactactcaaagaagtggcacagattcaggtttaatccaaagttttattcatttctctctgctcaagagccttcccacaaaataggcactagcctgtcctcacttactggaagtgggaagagaaataggataagaagttctctgccatggaggcaaaatagttggaaagggtacagtgaaaacatgaggaagctcagaaagactcatgatattccatgcccagatcttccttggagctataaaatagaataatttttctttcaagtaggttagctagctctcccccaataaaaataccactatcagagtagaaacaaggtagacatttctaaaacatatgtgcttcattatgaatccatggatggctcaattcttaaatgtaaatagatctctaggaaactcaaagtacagtgttttcaatctaaaaagaagtattggcagtttcacttgcaaaattacacagctggtccctgtgatgtgtctcgacaccaatacacaacccccttcccaccatccttcatgtcactagatacacaacccccttcccaccatcccttcagtcactagtgaaagctttcaagttagttatttcagtcaggatatacagtgttgaaatctcaatgcagttgaaatctggtctgatgtgcctaatttatctgtggaaaatttaatgctgaattacatttggttgggaaatgtccctcaaaatcctgggcactatgaaggaaccccctgccccctcacctttttgggtaggtaaaagactaaaagccatatggattttaactgataacaatgaaagtggtaaatcagtgtaaaagtgtcatattctcagacttgtgaggcggtttatagtcagaaagatttacggatttttttcctgtaacataaaagattgtgaacttttttttaattaaaaaatatttcctagggctgtagttatttgggagtttcataacctgttatggtgcttttggtggaatttttattatttagcattttaggagaccgctgtcaactggttttaatctatgatgctaatgtgttttccactgtaccctcatctcaggaataaaactgctttaacggagatgatgtcaggtacaaatacactatagagtcaaaataccatttacaaagaaaatcaaaagcatttctatattttgtctttttttagttcagacagcaaaggcatgtactactataaaatacaaagtgattttagagaatgaaaaatgctacttttatcttctctaaaattatttcccccaaggtagtgaagtaattggaatgaaggaggctgaaagtattgtctaaagtgagcccagaggccactgagaatgcagattactgacagccaggtctgtttagttgtaattggaagacacatgagtgtcctgcttacatgtagcttcagactgcagagacaggacgtgtgcttttcatttcaatatttagttatatttgatattttgaaactgtctgctttttgctatttctgcagtttcaagttagttagaagcatgttgtcaactaaagacaacaaactatcagattcattcattcagtgaagcagcctctgattctctaagagtcacgaatgtcttagtgttaccctcccctagtcaacagcagaccagcctggccaatgcctatgggtggcccctctggagtgctcactaacaagggtgagtgctctcgctaagaagtgtcccccgcctaatcatgtgtttataggatagtacacgttccccaggcccataacagaggactaaaatctctgaattttaaagacacagatgactggcatattttggataccagtatagctatatcaaatagacaaaaacagcttcactttagcaatgatcagattgttaatctacagattttattttttaaaatttggatgtaagtagagactttcagtatttgttttctcttgattttgaagtcatttcttcttctcacgtctgtgacaaatggttgaaaaggagtcaacatggccccaactatagtgccggaaccttttcatcattctgaggctttgccccacacatggtcctcactcatatctgtcaccttctgaagcctagatcttgttaacccatcaggtgcagtgtcagtttcaaatcaaattatctaagaaaacaagaaaacaaaggcagcagactattggtacacattatagtccaaagtgcttagcgaagtaaaaaaaaaagctttttaaaatttctattgttgtctattggtaatgtttttgatcagaataaagagggtaaagggaaaaagttactacacatgctaggctttctcagtggggaaaaaaatggctggatagaactgggacaaacacagacccatctttaggggtctggattttgtaggtccgactacacagcagtgttaactcatttctcatgccattagctctctacaaaataaagcaaagtagttctagtgtggtcgttataaaccaatattgtgaaaaatagcaactattcatttgttcacaacatgcgtatttatagagtagttaggtaccatttgtaaggtaaatcctttaaaattctataatacatactaaaatagtggttattggtctgatatatgctgctcttggttctataaactagataaaagcagtgctttgtgaaatgcagtgttctctcttaacgccactggtgataggaagtagttcccttcagttcaaatcctgtgcccttatttgctgcttgctgacgtaagcaataagtaaccctctaactaatggtatctacatatttctgtaacttgtatttaatgatggtgtacctggtgattgtaaaaatattagacagatataaaagtatctatataatatctataaactgttaatgctgaggt

SEQ ID NO: 458 - DNA, 5009 bp, Homo sapiens
gggggagcaaaagatcacaggctgacactcccagcagggtagatcctgggaatctgatctcctggcctcccccacatcctcccccctccacttcctggagcagcgacctgcccccttcccgcctgcacttccctccacttccagggccgggcttctcctcacaccagccagacagcctaccctccgcccaggggaagcggctgcctccgccaggccgcttccaggaagccccgggccaggccccagcattgttcaggccctggggccagcaccccagccagccgaacaccatgaagtccagcggccctgtggagaggctgctcagagccctggggaggagggacagcagccgggccgcaagcaggcctaggaaagctgagcctcatagcttccgggagaaggttttccggaagaaacctccagtctgtgcagtatgtaaggtgaccatcgatgggacaggcgtttcgtgcagagtctgcaaggtggcgacgcacagaaaatgtgaagcaaaggtgacttcagcctgtcaggccttgcctcccgtggagttgcggcgaaacacggccccagtcaggcgcatagagcacctgggatccaccaaatctctgaaccactcaaagcagcgcagcactctgcccaggagcttcagcctggacccgctcatggagcggcgctgggacttagacctcacctacgtgacggagcgcatcttggccgccgccttccccgcgcggcccgatgaacagcggcaccggggccacctgcgcgagctggcccatgtgctgcaatccaagcaccgggacaagtacctgctcttcaacctttcagagaaaaggcatgacctgacccgcttaaaccccaaggttcaagacttcggctggcctgagctgcatgctccacccctggacaagctgtgctccatctgcaaagccatggagacatggctcagtgctgacccacagcacgtggtcgtactatactgcaagggaaacaagggcaagcttggggtcatcgtttctgcctacatgcactacagcaagatctctgcaggggcggaccaggcactggccactcttaccatgcggaaattctgcgaggacaaggtggccacagaactgcagccctcccagcgtcgatatatcagctacttcagtgggctgctatctggctccatcagaatgaacagcagccctctcttcctgcactatgtgctcatccccatgctgccagcctttgaacctggcacaggcttccagcccttccttaaaatctaccagtccatgcagcttgtctacacatctggagtctatcacattgcaggccctggtccccagcagctttgcatcagcctggagccagccctcctcctcaaaggcgatgtcatggtaacatgttatcacaagggtggccggggcacagaccggaccctcgtgttccgagtccagttccacacctgcaccatccacggaccacagctcactttccccaaggaccagcttgacgaggcctggactgatgagaggttccccttccaagcctccgtggagtttgtcttctcctccagccccgagaagatcaaaggcagcactccacggaacgacccctcggtctctgtcgactacaacaccactgagccagccgtgcgctgggactcctatgagaacttcaaccagcaccacgaggacagtgtggatggctccttgacccacacccggggtcccctggatggcagtccttatgcccaggtgcagcggcctccccggcagacccccccggcaccctctccagagcctccaccaccccccatgctctctgtcagcagcgactcaggccattcctccacgctgaccacagagccggctgctgagtcccctggccggccgccccctacagctgctgaacggcaggagctggatcgcctcctaggaggctgcggagtggccagtgggggccggggagctgggcgcgagacggccatcctagatgacgaagagcagcccactgtgggcggaggcccccacctcggagtgtatccaggccataggcctggcctcagccgccactgctcctgccgccagggctaccgggagccctgcggggttcccaatgggggctactaccggccagagggaaccctggagaggaggcgactggcctacgggggctatgagggatccccccagggctacgccgaggcctcgatggagaagaggcgcctctgccgatcgctgtcagaggggctatacccctacccacctgagatggggaaaccagccactggggactttggctaccgcgccccaggctaccgggaggtggtcatcctggaggaccctgggctgcctgccctatacccatgcccagcctgcgaggagaagctggcgctgcctacagcagccttgtatggactgcggctggagagggaggctggagaagggtgggcaagtgaggctggcaagcctctcctgcacccagtgcggcctgggcacccgctgcctctgctcttgcctgcctgtgggcatcaccatgccccgatgcctgactacagctgcctgaagccacccaaggcaggcgaggaagggcacgagggctgctcctacaccatgtgccccgaaggcaggtatgggcatccagggtaccctgccctggtgacatacagctatggaggagcagttcccagttactgcccagcatatggccgtgtgcctcatagctgtggctctccaggagagggcagagggtatcccagccctggtgcccactccccacgggctggctccatttccccgggcagcccgccctatccacaatctaggaagctgagctacgagatccctacggaggagggaggggacaggtacccattgcctgggcacctggcctcagcaggacctttggcatctgcagagtcgctggagccggtgtcctggagggagggccccagtgggcacagcacactgcctcggtctccccgagatgccccatgcagtgcttcgtcagagttgtctggtccctccacgcccctgcacaccagcagtccagtccagggcaaggaaagcacccggcgacaggacaccaggtcccccacctcagcgcccactcagagactgagtcctggcgaggccttgccccctgtttcccaggcaggcaccggaaaggcccctgagctgccgtcgggaagtgggcctgagcctctggcccctagcccagtctctccgaccttccctcccagctcgcccagtgactggcctcaggaaaggagtccagggggccactcagatggcgccagtcctcggagccctgtgcccaccacacttcctggcctccgccacgccccctggcaaggccctcgaggcccccccgacagcccagatgggtctcccctcactcctgtgccttcccagatgccctggcttgtggccagcccagagccgcctcagagctcacctacacctgctttccccctggctgcctcctatgacaccaatggccttagccagcccccacttcctgagaaacgccacctgcccgggccggggcaacagccaggaccctggggcccagagcaggcatcatcgccagccagaggcatcagtcaccatgtcaccttcgcacctctgctctcagataatgtcccccaaaccccagagcctcctacacaagagagccaaagcaatgtcaagtttgtccaggatacatccaagttctggtacaagccacacctgtcccgtgaccaagccattgccctgctgaaggacaaggaccctggggccttcctgatcagggacagtcattcattccaaggagcttatgggctggccctcaaggtggccacaccgccacccagtgcccagccctggaaaggggaccccgtggaacagctggtccgccatttcctcatcgagactgggcccaaaggggtgaagatcaagggctgccccagtgagccctactttggcagcctgtccgccttggtctcccagcactccatctcccccatctccctgccctgctgcctgcgcattctcagcaaagatcctctggaagagaccccagaggctccagtgcccaccaacatgagcacagcggcagacctcctgcgtcagggtgctgcctgcagcgtgctctacttgacctcagtggagacagagtcactgacgggcccccaagctgtggcccgggccagctctgcagctctgagctgtagcccccgcccgacaccagctgttgtccacttcaaggtgtcagcccagggcattacactgacggacaaccaaaggaagctcttctttcgccgccattatccagtgaacagcatcaccttctccagcactgaccctcaagaccggagatggaccaacccagacgggaccacctccaagatctttggtttcgtggccaagaagccgggaagcccctgggagaatgtgtgtcacctctttgcagagcttgacccagatcagcctgctggcgccattgtcaccttcatcaccaaagttctactgggccagagaaaatgaaggaaggccacaagctcagagcccacatcaacactgcccccctcccagcaccccacagccctcacatcccctggcctggacccaggagacccaggagaaagcaccctcccttaggaatgaggagtgggcatcaggcctgggacactgctctccttccccgcccccagcctgctaagttaagtggacaggcccacaagatgaccttgcatgtgagcagatggcagagatgggtgtgtgaggggtgaggaggcatcagcagttgagccccgaaggagatcaggcagccccacctgcaggagaacgtcagccctccaggggatcagcccctgccagttccacccagctgcaggtgccagcacggcagggatgggagaggggtggggagcgagtcactgcctcctctgagcagagattcagagtaggatcacatgaataggggaaaaaagagagtctatttttgtctaataataaagaatttctataaacttt

SEQ ID NO: 459 - DNA, 4563 bp, Homo sapiens
ggtatcgataagcttgatcgcctcacagcgatggcggccgagcagggccggtggcggcggcggctgcggctacggccggagacggcagtgttggcggtagtggtgggtggcaggggcctgtgaccgggagctgcccccggacccgggcaccatgagccaaggcccccccacaggggagagcagcgagcccgaagcaaaagtcctccacactaagcggctttaccgggctgtggtggaggctgtgcatcgacttgacctcatcctttgcaacaaaactgcttatcaagaagtattcaaaccagaaaacattagcctgaggaacaagctgcgtgagctctgcgtcaagcttatgttcctgcacccagtggactatgggagaaaggctgaggagctgctgtggagaaaggtatactatgaagttatccagcttatcaagactaacaaaaagcacatccacagccggagcactttggaatgtgcctacaggacgcacctggttgctggtattggcttctaccagcatctccttctctatatccagtcccactaccagctggaactgcagtgctgcatcgactggacccatgtcactgaccccctcataggatgcaagaagccagtgtctgcctcagggaaggagatggattgggcacagatggcatgtcaccgatgtctggtgtatctgggggatttgtcccgatatcagaatgaattagctggcgtagataccgagctgctagccgagagattttactaccaagccctgtcagtagctcctcagattggaatgcccttcaatcagctgggcaccctggcaggcagcaagtactataatgtggaagccatgtattgctacctgcgctgcatccagtcagaagtgtcctttgagggagcctatgggaacctcaagcggctgtatgacaaggcagccaaaatgtaccaccaactgaagaagtgtgagactcggaaactgtctcctggcaaaaagcgatgtaaagacattaaaaggttgctagtgaactttatgtatctgcaaagcctcctacagcccaaaagcagctccgtggactcagagctgacctcactttgccagtcagtcctggaggacttcaacctctgcctcttctacctgccctcctcacccaacctcagcctggccagtgaggatgaggaggagtatgagagtggatatgctttcctcccggaccttctcatctttcaaatggtcatcatctgccttatgtgtgtgcacagcttggagagagcaggatccaagcagtacagtgcagccattgccttcaccctggccctcttttcccacctcgtcaatcatgtcaacatacggctgcaggctgagctggaagagggcgagaatcccgtcccggcattccagagtgatggcacagatgaaccagagtccaaggaacctgtggagaaagaggaggagccagatcctgagcctcctcctgtaacaccccaagtgggtgagggcagaaagagccgtaagttctctcgcctctcctgtctccgccgtcgccgccacccacccaaagttggtgatgacagtgacctgagtgaaggctttgaatcggactcaagccatgactcagcccgggccagtgagggctcagacagtggctctgacaagagtcttgaaggtgggggaacggcctttgatgctgaaacagactcggaaatgaatagccaggagtcccgatcagacttggaagatatggaggaagaggaggggacacggtcaccaaccctggagccccctcggggcagatcagaggctcccgattccctcaatggcccactgggccccagtgaggctagcattgccagcaatctacaagccatgtccacccagatgttccagactaagcgctgcttccgactggcccccacctttagcaacctgctcctccagcccaccaccaaccctcatacctcggccagccacaggccttgcgtcaatggggatgtagacaagccttcagagccagcctctgaggagggctctgagtcggaggggagtgagtccagtggacgctcctgtcggaatgagcgcagcatccaggagaagcttcaggtcctgatggccgaaggtctgcttcctgctgtgaaagtcttcctggactggcttcggaccaaccccgacctcatcatcgtgtgtgcgcagagctctcaaagtctgtggaaccgcctgtctgtgttgctgaatctgttgcctgctgctggtgaactccaggagtctggcctggccttgtgtcctgaggtccaagatcttcttgaaggttgtgaactgcctgacctcccctctagccttctgctcccagaggacatggctcttcgtaacctgcccccgctccgagctgcccacagacgctttaactttgacacggatcggcccctgctcagcaccttagaggagtcagtggtgcgcatctgctgcatccgcagctttggtcatttcatcgcccgcctgcaaggcagcatcctgcagttcaacccagaggttggcatcttcgtcagcattgcccagtctgagcaggagagcctgctgcagcaggcccaggcacagttccgaatggcacaggaggaagctcgtcggaacaggctcatgagagacatggctcagctacgacttcagctcgaagtgtctcagctggagggcagcctgcagcagcccaaggcccagtcagccatgtctccctacctcgtccctgacacccaggccctctgccaccatctccctgtcatccgccaactggccaccagtggccgcttcattgtcatcatcccaaggacagtgatcgatggcctggatttgctgaagaaggaacacccaggggcccgggatgggattcggtacctggaggcagagtttaaaaaaggaaacaggtacattcgctgccagaaagaggtgggaaagagctttgagcggcataagctgaagaggcaggatgcagatgcctggactctctataagatcctagacagctgcaaacagctgactctggcccagggggcaggtgaggaggatccgagtggcatggtgaccatcatcacaggccttccactggacaaccccagcgtgctttcaggccccatgcaggcagccctgcaggccgctgcccacgccagtgtggacatcaagaatgttctggacttctacaagcagtggaaggaaattggttgatactgacccccaggccctgcagtggggctgactccagatctctcctgccctccctggcagccaggaccagcacctgtagtcaccccaccacacgcagactcatgcacgcacacaggagggaggcctagctgctcagaggctgcagggagggcccaggagccggctgggagggtggggtccctttgttgccaagacgttaggaaagcgaggaaagtgcttggattaggagagtcttgtgggcccctggccagccttcctgcctcagctcccctgctgtctccaggggcaggtggtaggcatgggtacctgcatttcactggaatgggttcttggatctctgaggggaaggaacagcaaaagaggcccttcttcctcacccaagatgcagggtggttggggccaggagtttggaccctctaggtcttgggggaagagctgggtaatacctggtgtctgagtgattctctgcagacccttcccctcctcaaggatcacccatcctcctttcagccccctttatggggaccaggcagctctggagccagccacaggggctgttagagaagcaaggcctggagtggcctgcaccgagtagcagggtcagggttcgtgtgctcctcctcctgctgcaggggctgcacatcccattgccccacttctgctttgtgtctccctctgtctagcttccagggcagggagcaggccccacctagggctgcaggcagtctggcctgtgccagcacggtctcctgtgcccaccagccccacaggtgctgtgctttgtgctcttggctgctgtgctgggacagaatgggatgccaggaagagaagaaagggggtgcagtctgaggccaccaccccccttcctatctaagggagggctgaagacaaggggccggcattcagtgggcagcagaaaggagaggccccttgaagctgctcagtcagaggcccccgtccctccttttgccttccgcaggactgaagacctgaaggggctggcttttggagtgttgaggtgaatatctgggagcagagatcatgaatagctcagggcagtgaatggcgcaccaagagcagggctgtgtgtgggaggctgcagccaggattgcctcagctcctccccctcaggctgggaggatagcacaggctaggggctcggggtggagggtctcagctctgctgcccccaccccagtactagcctagcttcccaagctgtggcttagaggatagttggcttcctgcctctctcctctaaaatagcaagtctgggaaatcctggggtgagtggagtcaccccactcccagttgctggcagagactgagactaaagcatcacttaataaaccccccaagccc

SEQ ID NO: 460 - DNA, 1260 bp, Homo sapiens
cgagcgcacggacttctgctcactggggctcgaatgaccagaatctggggagtgagatggcctcaatcttgcgaagccctcaggctctccagctcactctagccctgatcaagcctgacgcagtcgcccatccactgattctggaggctgttcatcagcagattctaagcaacaagttcctgattgtacgaatgagagaactactgtggagaaaggaagattgccagaggttttaccgagagcatgaagggcgttttttctatcagaggctggtggagttcatggccagcgggccaatccgagcctacatccttgcccacaaggatgccatccagctctggaggacgctcatgggacccaccagagtgttccgagcacgccatgtggccccagattctatccgtgggagtttcggcctcactgacacccgcaacaccacccatggttcggactctgtggtttcagccagcagagagattgcagccttcttccctgacttcagtgaacagcgctggtatgaggaggaagagccccagttgcgctgtggccctgtgtgctatagcccagagggaggtgtccactatgtagctggaacaggaggcctaggaccagcctgatgcaggtctatgaagaccagtggtagtgcccagacttctcctagacatcttagtctaaaacattctcctaggaccagggaagcctgggttacagtgccatttctgttgggcaccaccacctgcctgagggcctagctcaccacagcacatcctccaggatctagccttctatctacctcttctctggaatgtttatggtggttcagaagaatgatgactcctctttgctgagaactgttcatccttcttcaagaagaagcttgccaggccgggcacggtcgtcacgcctataatcccagcactttgggaggccgaggcgggcggatcacaaggtcaggaattcgagaccagcctgaccaacatggtgaaaccccatctctactaaaaatacaacaattagccaggcatggtggtgcatgcctgtaatcccagctactcagaggctgaggcaggagaattgcttgaacctgggaggcagagggtgcagtgagccgagatcgtgccattgcactccagcctgggcgacattctgtctcaaaaaaaaaaaaaaaaaagaagcttgtctaattgacttgcctaaaaaatgcagtgactccaaacaacatttgacctgtcttcctcaataaaagtcaatgttctcccg

SEQ ID NO: 461 - DNA, 175737 bp, Homo sapiens
gatctgcccgcctcagcctcccaaagtgctgggattataggcgtgagccactgcgcctgacctttttttttttaaatcttttgagagagacgtagtcttgctctgtctcccaggttggagtgcagtggcgtgatctcggctcactgcaacctccgcctcccagattcaagcgattctcctgcctcagtctcccaagtagctgggattacaggcacctgccatcatgcccagctaattttgtatttttttgtagagacggggttttactgtgttggccaggctggtcttgaactcctgacctcagatgatctgcccgcctcggcctcccaaagtgttgggattacaggcgtgagccactgcgcctggcccacacatttttaggttataaaattaaacgtaatatggccaggtgcggtggctcacgcctgtaatcccagcactttggaggccaaggcgggtggatcgcctgaggtcaggagtttgagaccagcctggccaacatggcgaaactctgtctctactaaaaattcacaaaattagccgggtgtcgtggcgggggcctgtaattccggcaacttgggaggctgaggcaggagaattgcttgaacctgggaggcaggggttgcagtgagccaagactgtgccattgcactccaacctgggcaacaagagcaaaactccgtctcaaaaacaaacaaacaaacaaaacataatatgagactggacacagtggctcatgcctgtaatcttaacagtttggtaggctgaggtgggcagatcacttgagcccagaagttcgaaacaagccatgtcacccatgacatggcaaaactctgtctctacagaagatagaaaaattagccgggtgtggtggtgcatgcctgtagtcccagctactcaggaggctgaggtgatcctcccacctcagcccaggaggttaaggctgcagtgagctgtgatcatgccactgcactctagcatgggcaacagagtgagacccggtctcagaaaaaaaaaataataataatcaaatatatttgtgtaatacagatctactaatgggaagaactgaatttctctttttgaggttaacattttgcctaattgatgtacaaagttagtgttccagatggtcaaatttgactgtagatattcatgttcatgctgatctgtagagattgcaagtatttcatctttgaaaacatcttttcacacaggtaatgataggtgatatgtgaggtgcttgaaatgctgtgaagcacttacgactgtgtcactgtgacttgtagtgtacaaagcagcagtgcaaatcaggatgctgtagtcgctgtcgtgaccactcggctgtgtgttgtagagcaaaagcagccacagtattaagtaaatagtgtggccccgttccaataaaactttatttgttggatattggaatttgaatttcatacggttttcacagtctcaaaatattcttttgattttttttcaaccacttaaaaatgtaaaaaccattcttggcttgtgggctatacagaactagatgatgggccaggtttggcccatgggcagtagtttaccaagccttggtttaaagccctcatataagctgttgtagacattaagatgagttaaggcatatagtttagcacagcgcttagcaaaatagggagcgctgtgttcatcattgtcattcaagatgatcgttctctccaggtctggctgatgtgaggggtggaggtggtgtctgctttggatttctgctgttcctgagggagtatctgcattttccacagcttttctgtctgatttgtattttcctctgattccttttgtcatcaggtattcactgggcacctgctgtgggcagggctctgcgctgaggttctggagacaaaaggatgaatcgttgagcctgccctggtgtggtgctcccgttatcctttaggtataaaaacttgtggctattttttttttttttttgagacagagtcttgatctgtcacccaggctggagtgcagtggcacaatctcagctcaccacaacctctgccccccggggttcaagcgattctcctgcctcagcctcctgagtagctgggattacaggcgcccacgaaccacgcccagttaattttttaatgtttagtagagatggggtttcaccatcttggccaggctgatcttgaactcctgacatcgtgatccacctgcttcggcctcccaaagtgcaagtgttgggattacaggcgtgagccactgcacccggccatggctatggtttttgagaatgattggccaggtgatgcatttatttattttattactatttttcgagacggagtcttgatctatcacccaggctggagtgcagtggcgcgatctcggttcattacaacctccgcctcctaggctcaagtgattgttctgcctcagcctccaagtagctgggagtacaagtgcatgccactgcatgcgctaatttttgtatttttagtagagatggggttttgccatgttggcttggctggtctcaaactcctgacctcaggtgatccacccacctcggcctcccaaagtgctgggattacaggcatgagccaccacgcctagctcaggtgatgccattagtttctacacagttatcctctgtcatcccagactcaatgtgtccatcactggataggtcaccgcctcctaaagtttctcttgacctgctctcatctcccagaattttcctgtcacccagaatttgactcaggtacacaccaccacacctggataatttttctattttttgtagagatggggtttcaccatgtagcccaggctggtctctgtcttgaactcctgggctcaagcggtcctcctacctcaacctcccaaagtactgggattacagagtaattactgtgagccaccacatccagcttggccaccagcttattcaaagtctccaggatgctgggaccaccccccccaccacccgctccctgtttttgcataattgtatcttttttttttgagacggagtctcactctgtcacccaggctggagtgcaatggtgtggtctcggctcactgcaacctccacctcctgggttcaagcgattctcctgcctcagcctcctgagaagctgggactacaggtgtgtgccaccacacccggctaatttttgtatttgtagtacagatggaatttcaccatgttggccaggctggtcttgaactcctgaccttgtgatccacccgcctgtcctcccaaagtgctgggattataggcgtgagccaccgtgtctggcctttgtaattgtatctttgtgaatgagtgatttggttctgccctttttactccatatttataccagcctggctctaggagagtcagaaggcctgcccaagggtttctgccctctctgggccactgggccaaagctgtagcttgccctccgtgggctacctgggtcagccactcctgtgcttagggcttaatcactagttcgctgaggcctgaagtttaatcaacaccttgaggctaaacagctctggtccttgtgatcttcagcccatccctgcttttctctggtcctcctcaggagcttgtcaggccacgggggctccagtgatgaggctgaccatctttcttaagaggtgttctggtagcttgtattatgattggattgcgttgacttctcaaagccgaactgctgcttactagtagtacagtagactcccatttggcactgggctggtctttacccaggggtcccatagatgggtgtgtggaggggagaagagccagcatgcatccttgagttgttagttcaccaaaggatgtgaccctgtgttccacgagcgctcggtaattcctggtttgcactgatggcctttctctttggtaaagtcagggcgctgattatcttgtcggaagtatccagctggtcctctcttgggctccatcactgtgcaagtctctgctcataagaactcttcagttcccttctcctgggttcacagccaaggcaaaaaagagactccttggcctcttggcaaacatacatcccctacctggctggtcccccttcagcttccctctctaaggaacaacttgaacatagaaactccaacctcacctgtaatcccagcactctgggaggccaaggtgggcaggtcatttgaggccaggagttcaagaccagcgtggtcaacatggcgaaaccctggctctactaaaaattagcggtggtggcgcatgcctgtaatcccagctacttgggaggctgaggcacgagaatcacttgaaccagggaggcagaggctgcagtgagccagggtcatgccactgcactccagcttgggcaacagagagaccctgtctcaaaaaaagaaaaggaactccaacttctgaaagtaaacaacttatgcagtacatgattcctggagaggatttggtcaccaaccttccctccttccttccagggaaagcacacagaggggcagggcaagggcctccagtgcattacttcaccacttccctgagtaggtcttctcaagtccttggagccttcactttgtgatttgtcactgccagagagcaatgttgggatcatgagctgtgggtcctcagtctgactttaaagaaacctcacaaattgtctgctcctgattttcctgaccatgtttcccaccaatcctaacaaacctctgcttccctctcagtctcaacactctggtgttaatgcatttgaacctgctgtgtatctacttcctgtaattttttgagaattatctagaatggctcaaatcccacctttcccatgaagcctttctgaccactgcacatgctccttccccttgctgggctgtgtgctgcatgtgtgtacagggggacatcacatttgggtgcagcctgtcgtgtgggcgttccttttgacgcccgtgtcttgagagggctgtgtggtgttagcaggttagaggcagatgctaaagagacaggcctgaccattcactgacctagctttcctttccctgagcttcagtttcctcacctcttaaagggaaataaaaatagtatgagttgtgtgcagcttaactgagaggatgcctgtggagtgttcagggtgatggcagtggttattactattaatctttttctccccagccagacttgatgcctggacttggccacagcttgcttggtaaacccatttactgacatattaattgatccctcttctctcaccaggtacatggccacctctggcctagaccaccagctgaagatctttgacttgcgagggacgtaccagcctctgagcactcggaccctgccccatggagcagggcacctggccttctcccagaggggactgctggtggcgggaatgggtgacgttgtcaacatctgggcagggcagggcaaggccagcccaccctcccttgaacagccctacctcacccaccggctctcaggccctgtgcatggccttcagttctgcccctttgaagatgtgctgggggtggggcacactgggggcatcaccagcatgctggtccctggtgagtgggccaggggatggggcttgaagtgaatgaactctgggtggaagtttgggccagagacatccaggaactgggggcttagttgggctggagctgttggactgaggttcttccttatggctccatgcttctccctccctcccttcaggggccggtgagcccaacttcgatggcctggagagtaatccatacagaagccggaagcagcgccaggagtgggaggtgaaggccctgctagagaaggtgaggctcccctgctggagagggtgagatcccccccattgctggagagggtcaggttcccccgtcctggagagggtgaggttcctccttcctggagaaggtcaggttcccccctgctggagaaggtcaggttccccactgctggagaaggtcaggttcccccctgctggagaaggtaaggtttcctcttcctggagagggtgagattcccctctcctggacggggtcaggtttccctctgctggagagggtgagattccccctgctggagagggtcaggtttccctctgctggagagggtgaaattccctctcctggagagggtcaggttcccccctgctggagagggtgagattgcccctgttggaggtgaggttcccctgctgcagagagtgaggcccctgctgctggggaaggtgtggtttggggttggaggtagagaaagctctcctgatgtctcatgctgggggtcttgggtagaggggttcagcagcctccctggcttctctttttggtgctaccctcctgtggctccttgctgagtcctgtccctctgtgacacccccaggtacctgcagagcttatttgtctggacccacgagccctggccgaggtggatgtcatctccctggagcagggaaagaaggagcagatagagaggctggtatggagcaggcccctgaatgcccaggcccgtcttctcccccacatcctctccccaccatggcttgtccccagaagtgcggccagcaggtgggtgctgccagttccctgactccgaggctgtaacagatatcactcctgtcccctccctcagggctatgacccgcaggctaaggctcccttccagccaaagccaaagcagaagggccgcagctccacggcaagcctggtgaagaggaagaggaaggtcatggatgaggaacacagggtaaatgagcattggcatgggccgggccttccacaggctgcaccctcctgcttgtgcctctgcccttgtcagcctgccacttctcactctgtgcctgtgtcctccccgtctccggtccccaggacaaggtccggcagagccttcagcagcagcatcataaggaggcgaaggccaagcccacgggggcccggccatctgccctggacagatttgtgcgctgagccagactccagggttgcctgggaacagtctctccccaagatcacctgtagggaaatgagtgttccctggaacaaggaggtgggggcagtgtggccccttccccaactgggggtggacagctgtctcctggggtgggttggtattaaagaggaaagcgattttttggataatgtgtctggatcatcttgtggacctgttcccctcccccttgccaagcatgaggccattctaggatcggaggggtcagtgtcctgcctctacccccaccccataccttgtggctgctgtggccttagctttgccttttaggggccttcctcctcagagaggctgtcctctctcccatgtccctggagatgtccttcccatgcagcagggtctggcagcctctgggctctccaggtttgtggtgttctgggggtcctggtgaagaccacactgcactcgaagaagtggagacaagtttattgaggagcttgacacccctcttctgccctagcttgagagaacaactgcagcatttttttctttttctcttcccgatgaccatcttttgggctggcgggccaggcccctgggtgtctcccatatcgctgtctttagtgagactgaggatctggtataaggaaacagatcagctgcagccagtgagggcccctgcgttgggcctgggagagagaaggtcctgttcctgcctttcctgtggccccaggcactctcagctctgaagccaggctattgctcgacaccgcaggatgcccaggactccctggaaccaggagcaaaagggcgcagtcctttccccgtcagagccacccaccagcttccaggcttcctgcatcttccaggggtccagcctgtgggacgtcagcaggaatttcccatagcagcaccggtctagcgggtagtgggtggcaccagccagcttgacacactgtgttggggcgaggcctcctcgtcgggcacttacccccacaaagacatcctctaatgggagaaggggtgcccggctggccaccttgagaatgagctgcacagcagacgctgacagcacataccccgtgcctgaggcatagggtggaaaggggccccaggtgtgaggccactgctcctctgatacgcggtgcctgccccccggtgtccgagaggggttcacgcgccagtgcacccggcccaagtacagaagaggcacttcctcgctgtgcaaaacctggcctccttcctgctcagcctctctctggggttccgtgcttctctcccattgcccccaacggccccctcgcaagaccagctctgataccagttcagggacgttgacatacacatcatcgtccgtcttgaggacgtatcgggccatggggcagtgtttctcagcccagttcagcccgctgagggtctttagggtgaggttgcggtaggagtcctggaaggcggcctgcaagatatccccctgggctgctgactccgaggccaggtcactcccctgggaaccccacacggggtgctgtgcgttcggctctcccagcaagaatagcgtctgtaccctgagcccccgggcctcgcgcagcccgccccacgaagcccgaatggcgtttctctggttcaggttctccggagccgtgcacaccaggatgagcaggaagggaggggccccgggaccactgcaagcttcctggttggggatcaagaggcggggcagggccaggggcggccccggtgaggcgggggctgggagcagggaggctagtgagaggctcagcagctcctcccccaaccccgaaggcccgaagagggtccagacgatcaccagcagcaaagcggcgagaaggaggcgccggaagagcctgagctgcatggtgcggcgtactccgaggggatccgtaagagcgaagggcggagactagctccccgggcctgggtcacggccggggacttaaccgaccacgcccgggatgcggaggtctgagcgcgcgaccgggaccagcgcaccctggggggcggggagaggcggtgcagctgcggaccgcggtcgaggcatgctgcgggggtggctaccttgtcgccgcggcctcgccgccagcaagctccgctccatggctggccgactgcggcactcacggcccctcccccgcctcgccccggcggccggtctgccgcccgcttccgcgttgcgcgctcccatccccgccggaagcggcgtcggagcagcgcggcagggcgcggaaacccgggcgggtggagtggcaccaaacggagtgagaccggtctgtccagccgctccccatcccaacccaccgacgtactccaccagggagaccacacccttcataaccaacgtccgcgtttttgcctttgttgcttcggtcacagcccgaaggattttcccttatgactagatgaccccttaaaagaaaacaaaaacaaaaacaaaaaaacccagagtgaccaagacctgcaaactcaccttaactgcaactggctaggctcagctaacccactccacaatgatgctgcacaccaaccccagggtgttggtctctaaactggtctgggtcagcccctcaaggctgaactgttttaccctcacatttctctttacagagagggacatcactagctacatatagggagactggggggtctgcagcatcaccactgctaaaactaatagcactgtgtgggcaactgagtagggcagctctaaatggaaaaaggacccagcactttaacattccctattagaatggacagaaaggacaggaagccataggtatataaactatttattaacagacaaggcctacagacttatttcttcttggacacacccacggtgcggccacggcggccagtggtcttggtgtgctggcctcggacacgaaggctgcaggtaaaaagagaagagtcacaggtcatgcacagcagaaacaaaaggttggggaaaaagaagagcgagtaggaggaatgctgagtcgaggtaggcagggagatgagaccccccactcacccccagaagtgacgcagccctctatgggcccgaatcttcttcagtcgctccaggtcttcacggagcttgttgtccagaccattggctaggacctggattcagaggagggggcaagggatgttttatcccctgacctcctatgcccaattctgttaggaccctccacccttcctctaatcctgccctcatttcagtacacacctggctgtattttccatcctttacatccttctgtctgttcaagaaccagtctgggatcttgtactggcgtggattctgcataatggtgatcacacgttccacctggcaggcagaccaaggtcagatctagatggacccctttctgaggctgaccccacccccagcccccttccttgtcctcacctcatcctcagtgagttctcccgccctcttggtgaggtcaatgtctgctttcctcaacaccacatgagcatatcttcggcccacaccctgaatgaagtgaggggtttcggaattagtgttgaatctgatttttaaattcctttatagcctcattcaaaaagctcacaaaggtaggatctgcaataatctattttgcaatcccctaggtcaccctttcctcacccacctttccagatataaaccgttcgacagaaggttaactttgggccggtcgcagtggctcacgcctgtaatcccagcactttgggaggcccaagtgggcagatgacattgagggcaggagttcaaaaccagcctggccaacatggtgaaaccctgtctctactaaaaatacaagaaaagttgctgagcatggtggcaggtgcctgtaatcccagctacttgggaggctgcagcagaatagcttgaacctaggaggtggaggttgcagcaagccaagatcacgcaaccacactctaacctgggcgacagtgagaccccgtctcaaaaaaagaaaaaagtaactttgttcaggggtatgactgaatcatgaacacagaatttagtattacagacaaccctttgaaagcaggcagtatcttttttttcccccattgctcagcatatgtagttgtcactaagtgccttctgattcttgcatttaggagaacaaggggcctgccactccaagctgatgcagtaaaccagggtcttatgagttacaggctttgattaaggtattgggctgtcagttcctcagaatctctaagggtcacaattatttaggcaaatcactgtatccccataatcaaagtattccaagatcacaaactcaattttgtcagtgcccagaactgactgcccaagttattataaaaagaaactaatgcttacattggtagcatcacatcaacaccagcactagcacccatgccatctgaactcatgaaccaaagtgatttggagagtgaaggaggaactgaatactgagccctgcccctcattttgtccaactagaacatcagaatgtggccctatttggaaataaggtcgttacggaaataattaggtaaaatgacgttatatttgattagggtgggctctagatccaatgacaaatcatgagagagacacgaagaggaccatgagatgacagcaacagattggagtaatgcagctacaagccaaggaacactaaggattactgacaaccaccagaagacaggaagaggcaaggtaggattcttaagtgcctccagcgccaagagtaattttctgcttagtttatatgaacttgttacagtaggctccaggaaactaaaacaaatggcagttcctatctgcaagaaagagatcaagggttggcttcaccgtggctcatgcctatatgcctgtaatcccagcactttaggaggctgaggctggaggatcactgagcccaggagttcaagaccagcctggacaacacagcaagatccagattagccagatgtggtggtgcacacctgtagccccaactacttggaaagttgaggtaggaggattgacttgagccctggaggtcgaggctgcagtgaagagtgattccgccactccagcctgggcgacagtctcaaaaaataaatgtggctgggtgcagtggctcacgcctataatcccagcactttgggaggctgaggtgggtggatcacctgaggtcagaagtttaagaccagtttgaccaacatggtgaaaccccatctcttctaaaaatacaaaaattagctgggcgtgtgcctgtaatctcagctacttgggaggctgaggttgcagtgagataagattgcaccattgcactccggcctgggtgacggggtgagactctgtctcgggataaataaataaacatgaccaagggtcaaattattaggttgattcagaagagagcagggtctttcaaatttattaattaaatgacgaggtttcaccatgttgaccaggctggtctcgaactcctgacctcaggggatccgcccacttcagcctccgagtgagccactgcactaagcctcaaatttaattatatgtttacaagtgaaaagatttacttcaaaatgggtgtgggaagagatatagatgaaataagatttctaatttttagttagatacatccatgaaggttattctctattacacttatgaatgctgcacctctacttaagcctcacagccggtctctgaaataagtacagtatttcacactgccttattagtttcacagagcacccaacagaaggaatttccctctacaaattcctcaacagagccaacagtatccctactactatccattccctaacgtcgcctaagtacctaccatgcaacagaagccaagaagacaggcctagccctgcacgcatggacacatactggtaggctatttccacaactaactacacattctgacttaagggaaaaaaaaagaacgttatgtatctagaaagccaagaattcattaggtttgtggagagaaatactcaagtgaaataatattcttgcattcattgattcgattcttaaaagccaaagaaagatggatgtactccttcacacttcgacaggaaaggagtgtcaattatggctcatctgagtaaatgtcccactcagacttcttccaccctccatctacaggcttcttcacactttttatctgttggtatttctacttatccctcaagatgcccaataatcctccaattctcagggaatataaatttcgcaggaagggttgctgttatgatggtgggatgggtaaagaaaccgaatctagaagaaatctcacaagctcgtggttcaggaaaatcttagcgaattcgggtgagcaaccatacctcctccccacttccccaggtgaaatgttttggcttgaccttagaccactatcttggctttaatcacttattttctgtggtaaatgctaaaggggtcagtctctccctaaaccactttcttttcttaatccagcagtcaaggtgatctggatgagactcaagtctccccagccttgcttcatttttgcttatgtcttcacaacccaattctcatttacattccctattccttaccctacttcacttaccttaatggcagtgatggcaaaggctattttccgccgcccatcgatgttggtgttgagtactcgcaaaatatgctggaacttttcagggatcactagagactagttgaaaaagtacgggggaagaaatcagacacagtaaactatcaaacagtaaggccgataaggcaaacgaacttcatacaaaaaggttaagcctgtcacacaagtggcaagacacccgccccccattccttaggttttcacaccacagagcaaactcctcagtcctgcagagtaggcacatgaagcgttcaagcttgggaaaatgcaacctctggagagaggaagcaggtctcctgcccattcccaaaagtgcgtggcaaaagccagagttccccatatacgcccaagccttagacagctttcgtgcgcccgagcagtgacccttcctcgggcccgctctccggaattggaaatctttggtgtccctttccagggacgcgatccaaggctccatacagaaagtcgcaggccctcagggcaggacgtttccagaaccctgacagccggctttccttgcccgagctgcgatgccgctggatcacggcacggattccagtcttaccatggctgcagcacaagcggcggcgtgtaggcctcctgtggaagagagagcggaagtgacgcgatatcattatatagcttccaggaggaagaggcggtgcgatctaggagaagtgcttccggaaactgtttcagcgcgacctggctggatttatgagagtatggcttgggtaccacaacttccggtgcgcctttctttacagttcgtaaggttcataggtaagagaacagcgaaggttccggggctagtttgtgtttcagacttccatatttccatttgcagttgggtgaagtggttagagctgaaaggggacagctggagtcaaacaacttaactcaaatatctgggaacgatttcgcgctgaggaagaccctttgggacttgtagctccactccggggaacggactcgccgggactgacagttgccggaagtgaggctgcggggaatggccgccgctgcgaccatggcggctgcggcccgggaactggtgttgcgggctgggacctcagatatggaggaggaagagggcccgctggtgagagcgcggagctgtttctcctccgtagttccggtgctcctagcttcagaaagacctgagctgggtttaggcacaagggtgggaacttggctgctacccgtgatattacctgtttggctccccgtacccttccctgtgatcagacccgaccctgagcgggaccctagtggctgaaactcatgttctggggcacaaaatttcaacttcactccacattttggggtagagtcacgaagtagtatagtgtaaaggttaagaacatggcctctgaagccagactgcctgagttctatctctgccacttacacgctgtgtgcccttgggcaagttaaccagcttctctgtgccatcatttctcacacctttaaggtgaggaagatagaacctattgtatacatcgtcgttaggattagatgaatatgtgtaagattgcacctggcatgcaggtaaacactatgtgttttgacatttctagaaagcctggggttccccagaggtgtgatagaacacccaagatggcaggagtctgagggtcttaaatttaagtgcaagttctgctctatcctctgcaattcctagctttcctcattcggtcatctccactgcacttttttttttttttttttttttttgagacggagtcttgctctgtcgcccaggctggagtgcagtggcgcgatcttggctcactgcaagctccaccttccgggttcacgccattctcctgcctcaacctcccaagtagctgggactacaggcgcccgccaccgcgcccggctaattttttgtattttttagtagagacggggtttcactgtgttagccaggatggtctcgatctcctgacctcgtgatcttcccacctcggcctcccaaagtgctgggattacaggcgtgagccactgcgtccggcctccactgcactgtcttgtcttttacctttttttgttttctttagacgggtttccctgtgttacccaggttgaccttgaactcctgatctcctcaaacaatcttcccgtctcagcttctaagtagttgggactacaaggagcccaccaccatgctgggctacctccactgtctcactggatcgtctcactccttgtcgtattccttacccatcagcacaaaataggagagtgggtacaacgtgagactcttagaatttttcaaagcagtacctgtggctcccagtaaaagcagctccttctcacttgaaggactggggatatccaattatattttttctttctgtctttcaccgtaccctactcccattaacttatccctttccaggcgggtggtcctgggctccaggaaccactgcaacttggggagttggatatcacttctgatgaattcatcctggatgaagtggatggtaagcgatggcatggggtgggtgcagtacctgtaatctgagaggcatgggggctggaaggaataaggtagggattggtgtgcagatactcaatgtggggagagggagctgtggagctggacccttatgataaacttctatttccagttcacattcaggcaaatctggaggatgagttagtaaaggaagctcttaaaacggtgaggctttcccctgtactaatctgcccttctatctattctaccccaaaaggaaaaacaacagtctcttgcttttgttgtatcagcctggtatctgaccctttagtccttcactgattctgttacagtgtccctttactgagacttccttctgacctgtcatctttatgttctcccagggtgtagatctccgtcactattcaaagcaagttgagctggagctacagcagattgaacagaaatccattcgggattgtatcctccagcagagggaaggggtggtgctattgacatggggattttgtggcgtgtggtacagatgtcccagctggggtcaacatctctgaggtttctatcacttcaaagagaaattggagaggtactacaaatctgaggatctcccatcttcaccatgaggccccttgactttttgtggatcagatattcaagagagtgagaatatagcatctctacacaaccagatcacagcctgtgatgctgtcctggaggttagtaatcatgacctgtgacccctaatagctactctgaaccagatcatggactctggtgccatttttaggtcatcagcctcaagatggggacaggttagggtcattttcaagatgacttcaggagccttttttgttattactgccatatttaatgttatttcctgataatctggggtgtctcatcatctgccaccctcaaggactgataaatactgaagacttcacaaagagtctttggtggcccacttatcccctacaaaccctatagcactccggcaacatctaccctccctacagcgaatggagcagatgttgggagcttttcagagtgacctcagctccatcagctctgagatccggacactgcaggaacagtcaggagccatgaacattcgacttcgaaatcgccaggcagttcgggggaaacttggggagcttgttgatggtctggtggtgccttctgctctggtcacgtgagttaccagtttgaagggttataatgtccatagcaggtggatgggctggggtgacccaccctatttaccatatgggtctcctggctccaggttaagtgctttttagaaattagtagccaggttaaccaccatttctttaggtatgcattaggcatcaaagattaagattaagaatgatgtaagatcaggtgtatagtggggaggtccaggaatagaaaactttgtacatgtgtcctgactatatggtacaatgcaaggtggtagagatgacaggggctggaggtaaggagtgtggtctgggtctggtttagggatgtctgggtctcccttgtaactcatcccacccctccctgctaaccagggcaattctggaggctccagtgacagagcccaggttcttggagcagctacaggagctggatgccaaggcagccgcagtcagagagcaggaagctagaggcacagcagcctgcgcagatgtcagaggcgtgctcgatcggctccgggtcaaggtgggaagtagggatggataccctggaggctactggaagcagccttcccaagatcttcactatggatttccttggcagagctcactgtagcctgtctccagggacttcaccctgccttttctgggcagccccattcttgtctctctgggtttccctgaaaatcttgagaaataccaaagagatattcaccacccttctgcctatgtttaccatttgttgcttcccccagttcctctcatacagcaaaagggttgcagcttcatgccctgtgtttggttccccacatctaggcagtgacgaagatccgagagtttatcctccagaagatttattccttcaggaaacccatgaccaactatcagatcccccagacggccctgctgaagtacaggtcacaaccccaaggaagtgcatgggatggcctttgagtttttgagcggcctagtgtgggcatctggtttcttgggagacaggtagactgacatgttcctgaccccctaggttcttctatcagtttctgctgggcaatgaacgagcaacagcaaaggagatcagggatgaatatgtggagacgctgagcaagatttacctgtcttactaccgctcttacctggggcggctcatgaaggtgcaggtaaggtcaggagggagaggtattcctgggcacatggactgggaggaggggacatccctgggcaaggaatattttattgtgttgtgggaagagacggttatcagttctcttttctctttccttagtatgaggaagtcgctgagaaagatgatctaatgggtgtggaagatacagcaaagaaagatatcctagtactggggaaccctcatgccaggccttgagagtgggaggactttcgactccagccaccaatgcactgctccttaccttttcctatgggactgaaaccttttagaatgtgatgaaagctatagcctccctccccagaaagatgcacacattattttgacacatagttttgcatatgattgcaagggagggagagacaccctgaagcccattcacagatgtcagcacgtggggccctagtactgggaaagagggctggctaggccacgtctgcctgtctggggtccccacagatagtgagtctttgggcccagttatggtctcattgttttccctgactctgacccatcttacgattcttctcaaagccatcgctccgcagcaggaacaccattttcaccctaggaacccgcggctctgtcatctcccccactgaacttgaggcccccatcctggtgcctcacacagcgcagcgcggagagcagagggtatgaggaggaacaagcttcagtcacgaaagaggctctgagcacggtggggagggaaggccagacctcagggcagagcttcccaacctgcaggccctgtcttaatccccttagacttgggagtggccttctccaatcactccagcctgctgtgatgtgaaaagagctgggaaccattgacttaagggcatgcagaggggagagactggatgaggggaatgacagtcagaggcaggtgttgaggtggatgcaggagtagcaacagcaggtgggtgtaggccctttttgtacccctatgttcccccaccttttcagtgcccattcagcttgctcttagacagcccggacctagatagatgcgaagggtctgcctagctcttattactcaggtttactgattttccagccatatccatgggaagtcagtgttggggtccatcccttctgtttttcttctttactcctcctctcccagtatccatttgaggccctcttccgcagccagcactacgccctcctagacaattcctgccgcgaataccttttcatctgtgaattttttgttgtgtctggcccagctgcacacgacctgttccatgctgtcatgggccgtacactcagcatgaccctggtaagactcctgtttcctgtaccattcaacacctttgtccccagtcttcatcagcagcatagtggggtcatgactctggtagaactgaaatcaggatcgcctcattctaaaatgtctaagccttggctgggcgtggtagtgcacacccataatcccagcactttgggagtccaaggcagtaggattgcctgagctcaggagtttgagaccagcctgggcaacaacctcatctctacaaaaaatgaaaaattagccgggtgtgtgttgatgtgtgcctgtggtcacagctactaaagatgctgaggtggaaggattgcttgagcccaggaggtcaaggctgcagtgagccatgcactccagagtgagacctgtctcaaaaaaaaaaaaaaaaaaaaatagccaggtgcagtggcttacgcctgtaatcccagcactttgggaggctgaggcgggaggatcacaaggtcaggagtttgagaccagcctgaccaacatgatgaaaccctgtctctactaacagtacaaaaattagccaggtgtgcgcggcctgtaatcccagctactcgggaggctgaggcaggaggattgcttgaacctgggaggaggagattgcagtgagccaagattgcgccattgcactccagcctgggtgacagagcgagactccatctcaaaaaaaaaacttgttacttagacttgtcacagtgttactcccccatgaaatcctcagtgcgtagggtccctgagactacccctactgctgacccacaatcaggcaatagcacgtgaaaactgagggtcccccaaatcttggtgctcaaacccctgacccaagctcagccctgaactctgctgtgataggcttgtgatcatagatcctggtgtggccaggtgcagtggcttatgcctgcaatcccagtactttgggagaccaaggcaggaaggttgcttgaggccaggagttcgagaccagcctgggcaatgcggcaagaccttgtctctacaaaaaatttaaaaataaacttaaccaggcatggtggtacacacccatggtcccagttgcttggcaggctgaggtgggaacatcacttgagcccagatgtttgaggctgcagtgaactatgattgtaccattacaatccagcctaggtgacaaaacaacctgtctctaaagccgaaaacaccgggtgcagtggctcacacctgtaatcccagcactttaggaggctgaggtgggcggatcgcctgaggtcaggagttcgagaccagcttgaccaacatgatgaaaccccatctctactaaaatacaaaaattagtcgggcgtggtggcaggcgcctataattccagctactcaggaggctgaggcaggagaattgcttgaacctgggaggcaggcggaggttgcagtgagccgagattgtgccactgcattccagcttgggtggcaagagtgaaactctatctcaaaaaacaaaaaaaaagccaaaaacatagatcctggacaggaaagcagggggcagttccattttacgtctctcccttctgtcctgtccagtgcatcatccccaaagaaacaaatgcgtttgttcatagtcactgaggacaacaaactgacattctcttttaatcctctgtttgttccccaatcacacagaaacacctggattcttatctagctgactgctacgatgccattgctgtttttctctgtatccacattgttctccggttccgtaacattgcagcaaagagggatgttcctgccctggacaggtcactgaattctggtccttgatgcccaacaggccacgaactctcttggtcttgcatgactctgccctgaccttagactcctactgacctggtatcatcaacctttattcccattcatttgctccggaggcagtagtgctgctttttgactcacctttctccaaccactgccccccaacccccacaactagctattgaccattaaactgaatgatgccccactccctcccatccccctccaacattccttgctggctgacctctgattctgattaagcccacaggtactgggaacaggtgcttgccttgctatggccacggtttgaactgatcctggagatgaatgttcagagcgtccgaagcactgacccccagcgcctaggggggttggatactcggccccactatgtgagggagggcaagggtaacaaagggttcttgaaaggcagggctctaagcatcattgtgggggttggccaaggtcacagttgtgtcatgggccacgctatgagcaggtgttctgggagggtggtgaaactcatggtgagtggtgcactgtgggtaggagggactgaaggtagagtcacatcacatggaggtgggttggctaaggaagttgggaggttgtgttggttgggccaggaggtgggtgtgattttccttcccactctctcctagatcacacgccgctatgcagagttctcctccgctcttgtcagtatcaaccagacaattcctaatgaacggaccatgcaattgctgggacagctgcaggtgagggtcggacaggagacacttcccagcagcagggctgcttccagtgggtggagtctgaggaggagccagatggggcccagatgaccttgctttctggtgtcacctcttcctctctgccttttcaggtggaggtggagaattttgtcctccgagtggcagctgagttctcctcaaggaaggagcagcttgtgtttctgatcaacaactatgacatgatgctgggtgtgctgatggtaataggtgctccttctccttgccttcctacccagaaaattcggtttcccccactgctgttagctctgtgagggcagagatgatgcctgtcttgttcagtgttttactcttggagtctggcacagtgtccagcttagtacaataagtgtggaatgaaggggacatcctgaagtgaaggactgctttccccaaactagacatttccctttgtcttcccttaggagcgggctgcagatgacagcaaagaggttgagagcttccagcagctgctcaatgctcggacacaggtaggggtgtggggaaaagggaagagacagccttctgtgctgttttcagctctctctctctctctctctgtgtgtgtgtgtgtgtgtgtgtgtgtgtgtagggagtggcataatggatctcaggtatgcggaattactgtaactcttgattcacaacatactgtcattattggtctattttattttattttgtctttggtttttttttttttttttttttgaggcaaagtgtcactctgtcacccaggctggagtgcagtggcatgaacatggctcactgcagcctcaacagcctgggcttaagtgatccttctaccttagccccctgggtagctgggaccacaggtgcgagccaccatgcctagctaattttttatttttagaatgaattttatttttttctttatctatcctctcaagcatttatcctttgtgttataaacaatccgattacactaagttattttaaaatgtacaattaagttataattgactatagtcaccctgttgtgctgtcaaatagtaggtcttatttattcttcctatttttgtttgtacccattaatcatccccaccttctccccagccttccactagccttcccagcctctggtagccatccttctactctcttcgtacatgagtacatgagttcaattgttttgatttttagattccacgaatcagtgagaacacatgacgtttgtctttctgtgcctggcttatttcacttaatataataatttccaattctatgcatgttgttgcaaatgactgagtctcattcttttttatggctgagtagtactccattgtgtatatatcccacattttctttacccattcatctgttgatggacacttaggttgcttccaaatcttagctattgtgaacaatactgcaacaaacatgggagtgcaaatatctcttcaatgtactgatttcctttcttttgggtatatacccagcagtgggattgctgaatcatatggtagctctacttttagttttttgagcaaccttcaaactgttctccaaagtgtttgtactaatctacattcccaccaacagtgtataagggttcccttttctccacatccttgccagcattgctattgcctgtcttttggataaaagccattctgactggagtgagatgagatctcattgtagttttgatttgtatttctctgataatagtgatggtgagccccttttcatatatgtctgtttgccatttgtattcttttgaaaaatatctattcaaatcttttgcccattttttaataggattattagactgtcatgtagagttgtttgagccccttatatattctggttattaatcccttggcagatgggatgtgcaaatattctttgtctcttcactttattgtttctttagctgtgcagaagctttttttttttttttttttttttttgagatggagttttgttcttgttgtccaggctggagtgcgatggtgcgatctcagctcaccgcaacctccgcctcccaggttcaagcaattttcctgcctcagcctcctgagtagctgtgattacaggcatgtgccaccatgcctggctaattttgtatttttagtagagatggggtttcaccatgttggtcaggctggtctcaaactcctgacctcaggtgatctgcccagctctgtctcccaaagtgctgggattacaggcgtgagccaccgtgcccagctgtgcagaagctttgtaacttgacgtgatcccatttggccatttttgctttggttgcctgtgcttgtggggtatggctcaagaaatttttgcccagacccgtgtcttggagattttccccagtgttttcttgtagtagtttcataatttggtcttagatttaagtctttaatccatttgatttggttttcatatgtggcgagagataggggtatagtttcattcttctgtgtaatggatagccagttttcccagcaccattattgaagagactatctctctttttttttttttcagacggagtcttgctctgtcacctaggctggagtgcagtggtgcagtattggctcactgcaacctctgcctccttggttcaagtgattctcctgcctcagcctcctgaatagttgggattactgatgcctgccaccacgccgggctagtttttgtgtttttagtagagacgggatttcaccatgttagccaggcttgtcttgaactcctgacttcaagtgatcctcccacctgggcctcccaagtgctgggattacaggcgtgagctaccgtgcctgaccaagagactatcttttccccagtgtatgttcttggcacttttaccaaaaatgagtttactgtaggtgtgtgccagctaattttttaattttgtaaagacagttgtctttacaaaagacaactgttgcctgggctggtcttgaattactgccctcaagtgaaaaatcttatgattcttttttttttttaaagacggagtctcactctgactcccacactggagtgcagcgatacgatgtcagctcactgcaacgtccgcctcccaggttaagtgattctcctgcctcagcctctgagtagctgggactgcaggcacgtgccaccatgtccagctaatttttgtatttttagtagagatggggtttcaccatgttggcccagctggtcttaaaactcctgacctcaggtgattcacccgcctcagcctcccaaagtgctgggattataggcatgagtcactgcacccggcctagattctgtttttaatgacactggaaaacaacgaatttttgttttggcatatatatagctttacttttaaaagcaagaacacacacaaaaaaagggggaaaaaagcaagaacacaataaatgcaacatttagatcaacgagtacctgtgcacgagaagcacagggatggtttcagtaggatttcatagtttgatggtgacttttgccaagctgctgctacttggattgtgtggtgtgtttgtgagtgtttatatcattaaaaaacaaaacagccactgcactgggttgttttattttttaatgatataaacactgatgagacaaggcaagaaaacagcaaggcaaaaaagaaaaaaaaaaaagccaggcatggtggtatgcacctgtagttctagctatttgggagacaaaggcgagaggaccactttgaaatccaggagttcgagattacagcgagccatgatcatgacattgtagtctacccttggcaacacagcaagaccctgtctcaaacagcaaaacaaaacaaaaaaccccagaatcacaggatttttttcatgcataatttttctaatattgtcatgttattgcatatggctatagctcattccttttcactgccatatatgacttgtgtgattaaacatattctataaatggattgtttccagtttcttgcttctgtgagcattgttttatgaataatcatgtcttttagcacacatagatattgattatcttcatcaaaagtttctcttgggtataaacctaggacagtagtcttgctgctaataagatatgcagtattagtctttatgagacaatgataaattgttttcctaagtagttccttctcaccagcaatatgtaagaattcctactgagccacattttctccaacatgtggtattatcaggtctttgccattttttttctttttttttttagagaccaaggatgctgctaaagatgctcgggatcagaaatgtttcagattttgatttttttcggattttggattccttgcattatttttactggttagcatctgtagtctgaaaatctgaaatctgaaatgctccaaagagcattacctttgagcatcatgttgatactcaaaaacttccggattttggagcattttggatttcagattattggattagggatactcaacctgtatttcagtgggttttatttgtaattttctgattactaataacattgagcatcatttcaaatgtttagtaactatatgtaggggttcagtcaggctggtgggaaaaatattagtgatgatagccacaaaccctcttggaaggcctaagagtttgcataacttcagtaatagatatggttgaaggcgacctgatctttacctttagttaaataaattagagtaataacaaaggaatgtggggaagttatctaggtagcttgtttactcatatggtcttaagactaatctttgatgtaccgcaggtgcttaactgctttctactcaggaagtccacaatgtcagttaccccgtagtggtgttgactcaagtctttgtcaattaatctttactgaataaatgcgagtctcactagctggtcagggccgccattgcaactgtttacagtactcttcagggagtctgtaaacagcctggacacactcagctggactggcaaagcagagtatctgtgtgtcagtgtacctcattcatccgttgccgggtcaggggtctgcaagggacagactccctgaagctggtgctctgtgtgaggagcgtcaccacaactatacaatttttttttttcctgtaaaatggctgtcatagcatttgaccttttaaaaatcggcttgtggctgggcagggtgtacacctgtaatcccagcactttgggaggctgaggcggatggatcagttgaggccagtaattcaagaccagcctggccagcatggcagaaccctgtctctactagaagtacaaaaattaaccaggcatagtggcgcatgcctgtagtcccagctcctcaggggcgctgaacctgggaggcggaggttgcagtgagccaagattatgccactgcactccagcctcagttacagagcgtgactctctcaaaaaataaagaaaaaaataagtctgctagtattttttatttataagagttctttgcatcatctacatactaatcttgttgattatacgtaggttacagattatcttttagtatgtatctttttacttttttttttttttttggtgagatgagggtctttctgtgttgcccaggctcctgggctcaagaaatccttgcacctttttttttttttttttgagatggagtttcactcatgttgccgaggctggagtgcaatggtgtgatctcagctcactgcacctctgcctcccgggttcaagcacttatcctttctcagcctcctgagtagctgggattacaggcgtgtgctaccacgcccggctaatttttgtatatttagtagagatgggttttgccatgttggccaggccagtcttgaacgcctgacctcaggtgatccatccgcctcagcctcccaaaatgctgggattacaggcatgagccaccgcgtccagcctttgtttttttaatgttgctttttgattaaagaaatttgtaattttaatatgattgaatttatctgtccttcatttttatgtctttgtttttagtaacagtcttgctctgtcacccaagctggaatgcagtagtgtgatcatggctcactgtagcctcaacctcctgggctcaggcaaccctcctccctcagcctcccaagtaactaggactacaggtgtgtgccatatgcccagctaatttttgttgttgttgttgttttgtagagacagagtctcactatgttgcccaggctggtctcaaactcctggcctcaagtgatcctcccgcatcagcctcccaaagtgctgggcttacagccaccatctaccacgcctgactatttttgtcctgtttaagaaattcctgggctgggtgtggtggctcacgcctgtaatcccagtactttgggaggctgaggcgggtggattacgaggtcacgggatcgagaccatcctggccaacatggtgaaacctcgtctctactaaaaatacaaaaaaattagctgggcgtggtgatgcgtacctgtagtcctagctactcatgaggctgaggcaggagaatcacttgaaccagggaggtggaggatgcagtgagccaagatcgtgccactgcactccagactggtgatagagtgagactccgtttaaaaaaaaaaaaaatgaaattccttattactccaaggccagaaaaatattatgctacattttcttcttaatattgtagaattttggccaggtgcagtggctaaagcctgtaatcccagcactttgggaggccaaggcaggaagattgcttgaagccaggagtttgagaccagcctaggcagtatagtgagacctcatctctacaaaaaattaaaaaaatatattagccaagcatagtggcacacacctgtagtctctgctactcaggtagctgaggtgggaggatcacttgagcctgggaggtcgaggctgcagtgagccctgtttgtgctgctgcactccagcctgggcaacagagtgagaccctgtctcaaaaaataataataaaattaaagaataaacaaatatatagagagaatttttttgttacctttaagtctcaaatttacttggaattaatttttgtgtgtgatgtgaggtagggatctatttcttttttttatgtggatggttggcccagaaccatttatagaaaatctttttcttttctttttttttcttttctttttttttttttttagacagagtctcactcttgtcacccaggctggagtgcagggccacaatctcagcgcactgcaacctctgcctcctgggttcaagtgattctcctgcctcagcctcctgagtagctaggattacaggcatgtgccaccacacccagctaatttttgtatttttagtagagatggggtttcaccgtgttggctaggctggtctcgaaaagttttcacattttaaaaagtctttaaggattttgattagaattacattgtctatagactaatttggaagaattgatactttatgatattgaaacttcctatccatgatcatgatcatgggctccctatccttttttttttttttttttttttttttttttttttttttttgagacaggttttgctctgtcactcaggttggagtgcagtggcacaatcatagctcactgcagccttgaattcctgggttcaagtgcttctcttgtctcagcctcccgagtagctaggactagaggcacacagcaccacacttggcttttttttttctgtagagaatacaaaatttaaaaatttaattttttgtagtgtctcactaaactgggattacagatgtgagccactccacctggcctcctcctccaatttttaagagagtcttttaatgtcttttgataacctttttaaattttcagcacaaagacactgtaagtcgtttgccatatttttaggtgggtataatacgtatgtttagttctactaggaataaataaatcttttctagttttttgtctttaacatcttatgtttttgatttcttattctactggctaacactcccaggatgatgtttagaagttgaacagaaaggtgatagtgagaacccttttcatattcctgattttgaaagaattgttgctggtgctgtggctcatgcctgtaatcccagcactttgggatgctgagatgggagaatctcttgagcccaggagtttgagagtttgaggggatctgcctgggcaacatagtgagactccatttcttttttttttttttttttttagacagagtctccctctgtctcccaggctggagtggtgcagtggtgcaatctcagctcactgcaagctccgcctcccgggttcatgccattcttcctgcctcagcctcccgagtagctgagactacaggtgcccagcaccatgcccggtattttttttgtattttgtatttttagtagagacggggggtttcaccatgttagccaggatggtcttgatctgacctcgtcatctgcccgccttggcctcccaaagtgctgggattacaggtgttagccaccatgcccggctaagaccccatttctttaaaaaaaaaaaaaaaaaaaaaaaaaagccaggcgtagtggcatgcatttgtagttctagctgcttgggaggctgaggcgggatcattgcaggagattaaggcacccacaaagatgcacttaaaccagttgtttctgctgagagcagctgggatttgtcactggatttgccaggtatagagactcgccagctgccatcaatgcttctggtcctttttggtcagctgctgcttcatactacgtaggaaagattgttaaagcccagtgcactgtttcctctggtcactcctctgctatcaaggtgttctcttttgcgttatagaaagcttaaagttcatctaagtccagaccagtactcctataggaatataatgcatgccacaaatgtgagccacttaaataattttaaattttctagaagctacattaaaaagtaaggagaaacagatgaaataattttttaaaccactacatccaaaatattattatttcaacatataatcaataaaaaatagtactgaggccagcacggtggctcacacctgtaatcccagcacaggccaaggcagggaggatcgcttgagcccaggagtttgagaccagcctggacaacatggtgaaaccccatctctacaaaaaataaaaaaaaaatgagtgggacatgttggcacatgcctgttagtcccagctactcaggaggctgaggtgggataatcactgagccaggaaagttgaggttgtagtgagctgtgattgtgccactgcactccagcgtgggtgatggagcaagaccctgtttccgaaaaaaaaaaagaaaaaaaagatatacttaaaatttattctaagatgaagtcttcaaaatcaggtgtatatatcatgcttacaacacattatataatttatggctcctgcctagcaggggtcatcactgttagttcaacttttctttggcaagtctactccctgtgccccaccgtacactgctacattattgtttgtatatgtgtgtgtgagactgcatttaggcaactgtaataggttgaatttggttatttaatctctgtccaaaatcacatcacaaagatgccttgattatagaaagatccttccttgcagcatattagttatttgacaccctcagtggatataagtgaatattttgagggaagaatagaaaagatacaatttttatttatttatttatttatttatttactgagacaagttgctgctctgtcgcccaggctggagtgcagtgacatgatcttggctcactacaacctctgcctcccggttcaagtgattcttctgcttcagtctccctgagtagctggggttacaggcatgcaccaccacacctggctaattttagtattaataatttatttttaaatggaataataatttcactttcttcttaccagatctttctgtctgggttgtttgcttttatgagtttttttgtttgaatctcccttttacattaaacaaaaattaacattttattatgggaaatttcactatgctattagaaaagcatagtgaacccccaggcatcatcagtgatattcggtgtatagcagttcacggacagttttgtttcatctataccaacacctattgcttatcctccttctgtgtcccccagttactttgaattaaatcttatacatatacagatgaatattatcacttcatctgtatcagaatgttatttttattaagaaaattatttttgagatagggccttgctgtagtgcccaggctggagtgtagtagcatgatataactccctgcagcctcgaactcctgggctcaagtgatcctcccacctcagcctcctaagtaactgggactacaggtgtgtgccaccacacctggtaacagatggttttaaaaactacaatacattatcacacttaaaaaaattatcttatctaaaataactattcagattttcccagttatttcataagtgatttttttttttttttttttgagacacagtttcactcttgttgcctccaggctggagtgcaatggcccgatcttggcacactccaacatctgcctcccgggttcaagcaattctcctgcctcagtctcctgagtagctgggattatagacacccaccaccacgcccagctaatttttgtatttttagtagagacaggatttcaccatgttggccaggctggtctcaaactcctgacctcaggtgatctacccgcctcagcctcccaaaatgctgggattacaggcatgagccactgtgcctggccttcataaatgatttttatggttcaaatcaggatccatataaagtccatatatgtgtctttttttagtctatagatttcccttccatctcctctgcaatttatttttggaagaaactgagttattgagtcatttgtcatctagaatgatgtacagtttagattttgctgactgcattccatggtgtggccaaacttcctctgtctggtgtatttctcataagtgtgtaattagatggaaaggcttggtcagatttaaattagtttttttttttctacagggatatttgagaggtagtggtatgtatttccatcaggaagcacataatgtcttcttggctctctttgtgatgttagtagccatcaatttcagtgcctagatacattaattagatttctgtatctcctactatctcaaaattttccatcttctgtctgtgctacattctgagtcctttcttcagttataaattctaattcattgtataattcttgttaatctgttgactttctaaaactggcttttcatatctaaaaaaatttccttttttcaagtctgttcattcctcatagttcttactaattggtcatttttacatcctttttttttttttttttttttgagacggagtcttgctctgtcatccaggctggagtgcagtggcatgatctctgctcactgcaacctccgcctcccaagttcaagtgattctcttgcctcagtctcccgagtagctgggattataggcatccaccatcatgcccagctaatttttgtatttttagtagagatggggtttcatcatgttggccaggctggtcttgaactcctgacctcaggtgatctgcccacctcagcctcccaaagtgctgggattacaggcgtgagccactgtgcccggcctatccttaactttagacattgcacacagtacaactgctatccgtatcggatagttcttaaggtcagcagctattgcttattgtgtctgctgactctcttggtagctgcccttcttttgtgtctagtgatctttgagttcattgtttgatcttaaccaggggaactgtatgggccaaaattaggattgaggatatttttctccatagaggattttccttaacttttgcagcagctgaaagatgccattcagatggatctacattagtcatgatgccagaattgggcaaatctgctgacaccaggacacctgtgtatatgtgtttgtgtctttccaggaattcattgaagagttgctgtctcccccttttgggggtttagtggcatttgtgaaggaggctgaggctttgattgagcgtggacaggctgagcgacttcgaggggaagaaggtatgaggaaaatatggtaatgatgggatcagtggtaagggaagtggaaaagaaaaatgaaaggatgcagattacatggtgggggaatagagtatgaaagactggattgagagaataccagaaaagagggtttgatgataaggatggctataccttggggagaacttagtggagttgaagatcagccagatccctctctgacactgtttcctcctgctattagcccgggtaactcagctgatccgtggctttggtagttcctggaaatcatcagtggaatctctgagtcaggatgtaatgcggagtttcaccaacttcagaaatggcaccagtatcattcaggtgacctgcaagtcccaggccccactcagatcccccatcattaattattttccccatctttttgctgggctcagcatcatctaagtgacccttggtcttcagttactagctgtgcccaaagttctgtatgagccctaacctgattcttttttttttgtttgttttgttttttttttgagacagagtctagctctgttgtccaggctggagtgcagtggcacagtctcggctcactgcaacctctgcctcccaggttcaagtgattttcctgcctcagcctcccaagtagctgggattacaggtgcctgccaccacaaccagctaattttcgtatttgtagtagagatggggtttcactgtgttggccaggctggtctcgaattcctgacctcgtgatctgcccgccatggcctcccacagtgctgggattacaagtgtgagccactgcgcctggccgcctaacctgattcttaatcatcactattagcaccattttacggtttgatccctcaatgactttctttgaccagggagcgctgacccagctgatccagctctatcatcgcttccaccgggtgctgtcccagccgcagctccgagccctccctgcccgggctgagctcatcaacattcaccaccttatggtggagctcaagaagcataagcccaacttctgatgtgccagaaaccgccctgagatctgccggtcatctccatggacttctgcaccccattccatacccttcttcacctggggtaccccttccagttttccccttgcttcccaggcccttgacatggcttacctgccttcactcccagcaccttgcccaacaggataagctggatccccttggccttctgaatatcccagtgtcttcaggtttcccaagaccacttccctgtgggcttccaaaatggcctttatcatttctccagtctgtcaccctcctttcctgctcccatacacccaaggcttgtttcttcccctgtaaaaaccactgcctcaatctctggttcactcaactagtcaccatgtcctgaggcatgaagcctcctcagctcttggaattgctggcaaggggtgactgcctctgagtcattgtgtttttcaaagtgatttcttttctgtagctttttgacctaagatctcagcaatttgaacactaacctctcccctcctggctcaagaattactccgaagtcagtctgcagaaaataaatatttagtatgacatgacacttatcccatttcctttctccttcctcctgaaggtttttcaggtggccccatctctagaatgacctttcctttctgactacttcctgggcttacatcccttctggtgggtgtaacctctaacctctagctactcccaggccattggaggaaggtggcccctggctaaaatagcagatgctgcaagggatgagaaccaggccgcgcagccccagacactgtcccaagggctcccttgggacaagcccaagctgactctggaatccctcctccgtagcagctccatagctcctctggttgtggctgtgacagccccttgctcgggggctgcagcacccaacccacacccacaccgttggggcagggctagaccaggcgaaattcgtaccatccgtttgtttgacttggagccttcctgctgtcctcgcctatacgcctcgtttgaacttaggctctagactggagagacacggggacccctttaaggcctaagaagagaggcgcagttaaggaaaaatgttacgtttcctgtgtcctccacccctacggcctaaacattccctccccaggtccctggagagtggtggaaagcggttcctccccgcttaggcccttcggatgcaggtctagcccgtcggcaacgggaggtgtcctgagtgggtctgtgactgccgagcacacccgccgcggagcggaggctgctgcttcctgaggctgagagtggatccggctccgggctctcctaattggcggacgctggggggcggcgtggtaaggcagaacggagcggcatctcagctctcgccttttcagggttccgccccatatccgagagccgctctctaattggcttgggaaaccgtatctcagcgctttggcctagcgactttgaacgtgtttgcgcctgagaccgaagtgcagaagagggcgagcgcaggaggagaggcttggtgaatcagcgattcctgattggccaggcgtgccttgagggcggggccagaactgcgtccttaactgacctcgcccttgcccagatcaccgcctccgcgttgctccgggtttaccccgcctgactcgctgcgctatgcgttccctcacgcctgccggatgccaggcggcgatgtgccaggctctgaggggccgcgagctcaccccagacgccggccccgggaatcctctgctcctccactttcccttcccgctactggtttcttgcccacccactcccaggtgtcactcttgggacatccagatgttctgacatttgacctgactccagcctcagcgcgaggacgggagaagggccaagggtatgagattttggacaggagaggcattggctactctgacaaagagcgtggattcccaaagaaagggtccccagataccccgcaggggagactgtcgagacaggcgactttagccaactaatgctcgcacgcgaggagggctgtgcaggcaggcaccacggttcttcacagccttccttctttccttcccctgtccgtcgcagaacccaaatcctcagagctgatcgagaagcgcgtgttgttgcagaagtcactgaggggcagacctggaatgtgagccgtggggcgaagggacagctctggagactcgtgattccggaacccggtgggcattcaagtgatactggagcacgcagttttcggggacattaagctcgccccaggggtccacaggaaccctctgacccaacggtctctctggacaggatgatccagaacagacggtgaagagacaaaacagcgtgaaagggagcggcgatacctaaactgacctccggagggcagcatgatcaagggaaggagctgttctcgctccgctcaaacccccgcgcagcctctgcagcttactcctgcttcggaaggcggcgaggttccacccccaccaccccggtccccgccgccctcttcgcgctgaagctgcggagggtctttttcttcagcccccaaatcctctgctctgtggcttaagattcccaggcttaaacccataactgctagggtcatcactcctcaaacttctccctcacttgttttgctgatgacggacacaggggcctcacagactcagaagcatctggagtcatttcgaaggacagaactgtggcaatatcctctttccccctcctaatctctgagaacagtgtctgtatatggcacgggggtccctagtgtcatatagaaggactcggagatgtcctcatgggctgtaacggcccccggtgctattcagggatctctgttctttaaagaaatatcatttccccttatttctctacctttgtgccctcacctcgccctgaattgtttcttaaactgggctttctgggaaacgtttacttcgtgttcaacagcaaagtctcggcataaggcgagggcggcagggggtggggggcgggcgtttgctcgccttggcattaatttcagagctgctgaacgtggacaaaagagagggaacatcctcctttcttccattcctgtaaatatggacccacccaccctccacttaagatgggtggcttttctgattttaagatatcaagcagcctggcgaggtggctgacacctgggatcccagaactttgggaagccgaggcgggaagatcccttaaggccaggagttctagaccagcctggccaatatggcgaaaacccatctctactaaaaatacaaaaattagcctggcgtggtggtgcctgcctataatcccagctactagggtggctgagtcaggagagtcgcttgaacctgggaggcggaggttgtaatgagccgagatggccactgcactccagcctgggtgacagtgagactctgtctcaaaaataataataataataataataaaaagatataaattggctgggctttaaaataaagtagtcagaggcccagggtggtgactcatgcctgtaatccttttggaaggcagaggccagaggatcttgagcacaggagtttgagactagcctgggcaacatagggagacccatctctaccaaaaaaaaaaaaaaaaaaaagcaaaaagccaagcatggtggcccatgcctgtggtcccagctagttgtgaggctgaggcaggaggattgcttgagaacaggagttagagattgcagtgagctatgattgcactactgcactccagcctgggtgacagagtgagaccctatctctttttaaaaaattaaaaaacaaagtagatttagtgtgaagattcaaggaaagaaagagaaagcaagacaaaactttaaggagaggagaatcgaaattggctgacttcaccctggacataatggacacagctattcatgttacgtactagcgttaacaaagtgttttcagaagcagttgtcattaaaccaacacatttattgaagctcttctctgtgttctgtgataggcactgcggattcagcagagactaaatcaaagtccttgatctcggagagcacatatttcatctaattgaattcacataccagccttatgaggaggtgttcttcctgtttcaggtaatgagcttgaatttcaaataatgagttcaaaaccatataggcactcagtggctgaaccttctgtgcccacattcagcttttgttctatgactccaggctgggagtcatggagctgaggaggcagccggttgtagagaagcaacagattaataagtaatagtaaattattgaaaaaatatttacagaactgaaggaaaagctgaacaggcggtctttggaaaggacagaagccaggatagttccagcatccaggcagcagacaccaatggtcagtgcttctactttggatcaaaaagagagaactccaataggcttagggtgggtcaggtgctcacactcatctgaggaaggggagggtcccttgaggaatagtaccatagactacccaatgttggaggataatggccccaacgcaaaaatgggatcttgccaccagacaaatgggatatagatgccaggctgcaaaatccaacaaatgtacacgtgcccaaatcccgactccatcactaatagccatgcaatcctctgactatcaattagattaattgacactcttttttctctcgctactgtggtacatgcagtagttacctttattcttcactttgttttctcataagactaacaagcagttttttaaaataaagaaataaaagcaaaattgcttattgtcttagtctattcattggcaaactagtaacattaaataaactccagacagagccactggagaagaatcaagtacaacttagtagaaataacaccgtatgtgtgaaggtgagtgtgtgtgtgtgtgtgtgtgtgtgtgtgtgtgtgtgtgtgatggaaaatactttgtcctgcccaaactgtaagtcatgaccatgcccctctcagcagaagtttatcttcatctcatttggaagtttataagaacacagcttaaaaaaaacctgtgattttggagcaaggtcaagcctttgctattgcttccacattttgttttgttttatttatttatttacttttcagttttttggagttttctttatttgtttgtgtttttgagacagggtctcgctctgttgcccaggctggagtgcagaggcaccatctcggctcactgcaacctctgcctcccgggttcaagcgattcccctggcttagcctactgagtagctgggattactggcacgcaccaccacatccagctaatttttgtattttcagtagacactgaaatacatgtttgccatgttggctgggctggtctcaaactcctggcctcatgtgatctgcctgcctcggcctcccaaagtgctgggattacaggcatgagccaccacgcctgcctagtttttagttttttgagacagagtcttgctcagttacccaggctggaatgcagtggcatgatcacagtttactgcagcctcgacctcatggatttaagcaatcctcccacctcagcctctgggatagctgggactacagtcatgtgccaccacacctggctaatttttgtattttttggtaaacgaggtttcaccatgttgcccaggctggtcttgaactcctgagctcaagtgatctcctacctcggcctcccaaagtgttggaattacaggcatgagccactgccccagctgttttattaatttagttaaaaatatatgaaaagaggccctgcgcggtggctcacgcctgtaatcccagcactttgggaggctgaggtgggcggatcacctgcggttttggagttcaagaccagcctgaccaacatggagaaaccccatctctactaaaaatataaaaaatcagctaggcatggtggcacatacctgtaatctcagctactcgagaggctgaggcaggagaattgccctaacccagaggaggttgtggtgagccaagattgcgccattgcactccagcctgggcaacaagagcgaaactctgtctcaaaaaaaaaagtatatatatatatatatatatatgaaaaggctgggtgcggtggctcacgcctgtaatcctaacactttgggaggctgaggcaggtggatcacctgaggtcaggaatttgagaccagcctggccaacatggcaaaaccgtgtctctactaaaaataaaaaaattagccaggcatggtggcaggcgcctgtaatcccaactacttgggaggctgaggcaggtggatcacctgaggtcaggaatttgagaccagcctggccaacatggcaaaaccctgtccctactaaaaatacaaaaattagccaggcatggtggcaggtgcctgtaatcccaactacttgggaggctgaggcaggagaattgcttgaactcagggggcagaagttggcagtgagccaagatcacaccatttcactccagtctgggcaaaagagcaagattctgtctcaaaaaaaaaaaaaaaaaaaaaaaaaaaaatatatatatatatatatatatatatatatatatatatatatatatatatatacatacatacacacacacatacacacatacaggcactagccaggcgtggtggctcatgcctgtaatcccagcactttgggaggccgaggcgggcagatcacaaaacaggcagggcatggtggtccacgcctgtaatcctagcactttgggaggctgaggtgggcagatcacttgagcacaggagttcgagactagcctgagcaacatggcgaaactctgtctctaccaaaaatacaaaaattagctgggtgtggtggtgcatgccagtaatcccagctactccggaggctgagaggcaggaggattgcttggggaggcagaggttgcagtgagccgagatggcaccactagactccagcccaggtgacagagggagaccctgtctcaaaaaaaaaaaaaaaaaagaaagaaaagaagaaaagaaaaacaaatcacctgccttatgaagaaacagtttgtaatagatataagacacagaatgtgcagcccctggtatggaataagtccttagaaaatgttagtttcctctctgtccctgtgtgacatgaagggaattccagggccagtgccacttcctggtggtttccctcacttaagtgctgtgtaccccattgcaaaagcatgtcttccaggttcctgataccacatcccatgtcctctgcctttggggctctcataggattaagtgtcattttccctatgaactagaaaagaatcttctgaacgtctgccttgggactgatgatatagctgagctgaaaggacaattagttttcctccccagaccaacccaaccttcaaggctggggactcatttgatgctcccattcaaacatttggagaaaattgtctctgagtaccaggtctttttagcatattttctccaaatgttacatccttaggggctttgaatagtagaagagccttcaacattggttcagatggaagcatgcaggcatgtggagagttgccactccctgatccctgaaacaaggcttaggatggaaaagagcctcctggggaggttggctctgaatgtaaagctgggagaggcacctcctgtcaacctaagggcttgttggtaggggcaacatgttgacctggcttccttcccactctgagacatcactggctctcatgcagagctattttccttctttctttctttctttctttctttcttctttctttctttctttctttctttctttctttctttctttctttctttctttctttcttttcttttcttttctttctttctttttttttttgagacggagtttcactcttgttgcccaggctagagtgcaacggcacgatctcagctcaccacaactgccacctccctgggccaagcaattctcgtgcctcagcctcccgagtagctgggattacaggcatgtgccaccatgcccagctaattttgtatttttagtagagatggggtttctccttgttggtcaggctcgtctcaaactcccaacctcaggtgatccacctgccttggcctcccaaagtgctgggattacaggagtaagctgccgtgcctggcctttcattcttttctttccttctttccttctttccttccttccttctttccttctttccttccttccttcctccctccttccctccctccctcctttcttctttcttctctttctttctccttccttccttctctctctcttttcttttctttcttctttctgggtttcgctctattgccgaggctggagtgcagtgagtggcacgatcacggctcactgtagcctcaacttcctaggctccagcgatcctcctacctcagcctccttagtagctgggattgcaggcatgagccactgtgcccagtgtaatgcagggctcttcatccaggatcccaaagggcaaacaaaaataggagaaaattacatttcattttcactaatctctaactgaaatttagcattttctccaatgataaatgtaggcaataaacctacaccggtatttgtagtacatgtgactgttgttaatagaatttacacatttgtgtcatcttccagtagttgcagaaatttcaaaatgtcatgtatgctcacggttactttgtagttagtggtagtggttagactcaccactagatcttcttcttacacattttgtttcattttgacaactgtacttcaatatgattgttttcctttgtaatcccatttattttactttatgcagttgaagattattctgacactccacagacttcaccagacttccaaaacctgtcctagacgtaaaaagttaagaaaccttaaatctctaatgatgctgtcatttcctgttttgtattatcttacaaccagggtaattaggaatgccttcttcttcttctttttttttttttttttttgagacggagtcttgccctgtcacccaggctggagtgcagtggcacaatcttggctcactgcaacctctgcctcccgggttcaagtgattctcctgcctcagcctcccaagtaggtgggattgcaggcatccaccaccatgcccagctatttttttgtatatttagtagagatggggtttcaccatgttggccaggctggtcttgaactcctgacatcaggtgatccacccacctcagcctcccaaagtgctgggattacaggcatgagccaccgtgcctggcttgctttcttcttgtttaaactaaaggtcttcttgtaaaattcctgcttatattttcttcattattactcaaattcaattattcatttatttgccaaatatttagaaaacacttctcttgtacaaaaccatgctgcataaaactgttattatgcgaaaaataatccttactcgccatgccctctaccccgaccccccaaccccatttacaatctggtagagctggactgtttacccacataggacacacaggctgcagcttaccatgggcagggagtggggatggttgttccaggtgcaggtaataagaaggtgtattgtctgtggagaatttaaaaataattctaaaaccaactttttttttttttttttttttgagatggagtctgactctttggcccaggctggagtgcagtggcaccatcttggctcactgcagcctctgcctcccgggttccagtgattctcctgcctcagcctcccaggtagctggcattacaggcacacaccaccacgccaggctaatttttgtgtttttagtagagacggggttttaccacgttggccaggctggtcttgaactcctgacctcaggtgatctgcccacctcaccctcccaaagtgctaggattacaggtgtgagccactgcgcccagcctgaagccaactttttattgatactgcgcaccagcaattataaaaaaatgttagtgacaaaataccccttgcagtgtagcctcctccccccactccaccctgcttggtatgccactgcacacaggggagtttaaccatttccagtttacacacacacacacagacacacacacacacacacacacacacacacacacaaacacacagagcctttgagacttccttttctcctcaactcccccagcccagttctcatgtcactctactcagggtaggatctgcagcactgctgggccagtatccccaaaggtgagccctgtaagctccttggcctctggatggtctcattaatagtccaggatgagccctgcaatcttggcatctgtaggcaggtctcagctcttcttcacacccctgggcttgaaccccttggcaactgcgtttgacagtacatgattcccattcttcatctccagattttccatccttcaagaaaacactggatttcctggtcaagccaaggcttaatgaactggcctggcagcttctctggtcctcaagtttccttttcttgccttactttctgaagacttctagtagttttacttggaagtgtcactgtctccatttttattcctgagttttctgcagttcttttttctgtggccccacggactcatccagagcctgcagggagctgacacctcatctgagctgctagaattgaggtgagaaaggaggttcctaagtgcagaaatgtgttttctcctctccagccaccactgaaggctttggatgtgattgagtcagacctctcctgcacagtctccctttggattacctcaagataaaccaatttgtgactttaattacatccgcgaagtcccttcccagctgcacctaagctaaagtgtgattgaatgaatgaaagagggtgtgctggcgatcagctagggaagtgattccaagggtccctagactccacattaccaactgcaaaatgtgacgttcttacgttctgacaagcgaactctcctcccaaattcattgcctgagttgatgcaaatgaattcagccacgccttttgggtttggcatctgagaagtgtctgtgacttgggaagagtggtcagaatggcgataatgggaagagaccacatttcagctggtggagagtgaaaggacagccaacatcttgccctttctgaagcatacacacattggagattgaaagtgtctgttggcctcacaggcactgaggaaagcctcccatccccttagattttcctcctttttcctgaggtcccctgaacctaatagtctgtaaccttattccatgtctgggtcaacaaaccaccttccaaggaggacttgaatataataatccgtttcctctgcattcctccagaacacagagtccacaccatccatgagtctgtcaaacaaaacattcctcattggtctcaatgttgagcactgaaagttctctgagctcatttagcaccaactcatcatccttaaaatccacaggatgggccgggtgcagtgacccatgcctgtgactacaacaccttgggaggccaaggggcagatctcttgagcccaggagttcaagaccagcctgggaaacatggtgagacaccttctctacaaaaaaaaatttttttttttgagacggaatctcactctgtcgcccaggctggagtgcagtggtgcaatctcggctcgctgcaacctccgcctccagggttcaagcgactctctgcctcagctcccgagtagctgggattgcaggcatccaccaccatgcccagctaatttttgtatttttagtagagacagggttttaccacgttggccaggctggtctcgaactcctgacctcgtgatctacccgcctcagcctcccaaagtgctgggattacaggtgtgagccaccatgcccggcctacaaaaatttttttaaaaaaattagccaggaatggtggtgtacacctgtggtcccagctacttgggaagctgagataggaggattccttgagcccaggaggttgaggctgcacagtgagctgtgatcacgccactgtactccagcctgagcaatagtgagaccttatctcagaaaacaaacaaaacaaccaaaaatatccataggatgaaacatatgtttgattatgacaacttgcttatggtaccttctggatggcccagctcccttgcagatccccagaccaacagcttttgttgtagtgacagcttcttcttgtaacctctttttttttttttttgagatggaatttcactcttgttgcccaggctggagtgcaatgacatgatctcggctcactgcagcctctgcctccagggttcaagcgattctgctgcctcagcctcctgagtagctggaactacaggtatgcaccaccatgcccggctaatgtttgtatttttaatagggacggtgttttgccatgttggccaggctggtctcgaactcctggcctcaggtgatccacctgcctcagcttcccaaagtgcttggattacaggcgtgagccactgcacctggcctacagcctctaatttcattttcatccaaaagctttaatggaaggcccacagattccctcttcaagtaacagcaaagcgcatctcctttaagatttctttgatcatcttcataaagcttgactttgaagtcttctgaggatttctcctggaggcaaaccagatatatagacatttgtatttctgtcttcttcaacatgaaattatcctcattccatttttcttttatctcccctgtttttaggatcagtgggtttggggggttttctttgcagaaattctgcattcctagcattgacattttgtacatttgcaggagagctagatgccccaccattagaaaagccacacttggctgggtatgtagcaatgaaaccttcagtggccttgggaaaccacgccttcttgtccagatcccactcattgtgggagtcagttggctgctgccctaaataacccgtttgtcactgagatcttcttgtctgttgcagtccttagtgtctccatataatttatgcattcacaactgctcatcaagtcatcattatcatccacttcatgtttcctacctagccaggggcagggttcaggtaatcaaagaggctgctctgctgggcctgcaaggctccaccaagtgtgtctgaggtgacagcccaagcactgttataaatatttgcgcactgttgtaaacatttgcattagtcccttctcgcactgctataaagaaatacctgaaactgggtaacttataaagaaaagaggttgccgggcgcggtggctcatgcctgtagtcccagcactttgggtggctgaggcaggtggatcacttgaggtcaggagtttgagaccagcctggccaatatggtgaaaccccgtttctactaagaatacaaaaattagccgggcatggtggccagcacctgtaatcccagctacttgggaggctgaagcaggagaatcacttgatccggggaggcagaggttgcagtgagccaagatcatgccactgcactccagcctgggtgacagagcaagactccgtctcggaaaaaaagaaaagaaaagatgtttgctgggcacagtggctcatgcttgtaatcctagcagcactttgggaggctgaggccggagggttaatcacttgagctcaagagtttgagaccagcctgggcaacatggcaaaaacccgtctctataaaaaattcaaaacttagctgggtatggtggcatgtgcttgtggttctagctacttggggagctgaggtgggagaattgcttcagaccagaaggtagaggctacagtgagctgtgattgcgccactgcctgggcgacagagcaagaccctatctcaaaaaaaaaaagaggtttaattggctcatggttctgtgggctctacaggaagcatgatgctggcatctgcttgccttctggggaggtctccagaaacttacaattatggcagaaggcaaaggaggagcgagccttctcacatggcaggagccgagagagagggaggaggtgcggcacacttttaaacaaccagagcttgccagaactctctatcatgagaacagcaccaggaggatggtgctaaaccattcgtgagaatccactcccataatccaaccacctctcaccaggctccacctccaacactgggactacatgagatttggtggggacacagatccaaaccatatcaacatttaacacattgcatctttgaattgtcacagcaaccctgtgaggtgggtactagtgttatccccattttacagagaggaaattgatgcccagagaccttgccaaggttatagacaggacagttagtgcatgacaaagctggaattggaatgcagccagttctgctttagaagccactttcttgcctgcctttctttctttatttctttatcttttctttctttctctctctctccttccttccttccttccttttctttcttttcttttcttttttttttttttttttgagacagggtctggctttgttgctcaggctggagtgtggtggcaccatcttggctcactgcaacctccaccttctgggctcaagtcatcctcctacctaagcttcccaagtagctgggattacaggtgcataccaccacacctggctaatgtttgtattttttttagtagagatggggtttcaccatgtttgctaggctggtcttgtactcctggcctcccaaagtgctgggattagaggcgtgagctattgcaccccgcctgaagctacattctttttttttttttttttttaatgagacgagtcttgctctgtcccccaggctggagtggtgcagtggcgtgatcttggctcactggaacctccgcctcccgggttcaagcaattctcctgcctcagcctctcgagtagctgggattacaggcacctgccaccactcctggctgttttttccatttttaatagagacggggcttcaccatattggccatgctggtctcaaactcctgacctcaagcgatccgcctgccttggccttccaaagtgctgggatacaggcataagccatcgtgcctggccaaggctacattcttaaacgccactttttacagcttccaagaaactaactgggtgaaatccagcctgcctcctgtccttgtttttatcatttcatagtgaaaacataaactcccaagcccacctactctattgcactgtgtctccatgacactctgtaccttctggctctgactcagccctccactttccccctccctaacctgcctgtgccctctaataaactgtagcccccctcatacccttagcttctccttggagcattccctccacttcctggcgttaagtgaaatttaactctcccttgagggcactacctcctttgcaggcttctgaaatgagagctgttgattttcttacagctgagggtgctctcctggcttcagattgctgcctccggactactcctcccccagcccccaactctagtttaaaataacccgcggccttccaggcactgcaattaggctaaactttcctcttcctttctcactgctactgtctgccagacccctccacctcactcaggggaacgctggcccagctgaccgtctgtctttgcattgagtcctccctctgggagacttcattgtccacctggaggatccattccctacttgacctctcaataacctggccacttaatccccaagaatcttctcctctccaactcggccacacattctcattgtcataccctggaccttatcacctgaaagagcccctccttgagaatcagtcaagcagcctgctcttggcccccacctcctaaccgtctgtccatcagtctgtctgccctcctcgcaaccaattttcagtctcctaggacctttggatcaatgatgccttccgtcttccagcttatgagcccctccctattcagctcaactccacaacccttcatttcaacacctctctggacaatgtcgccaactccccttcccctctgtattttcatcctttgtacccaagtggcaaaaccccaaccctggatgagcccagtgatctgttttcttcaggattttactctgatagccaagaactgttggtggtggtgggggaaatcacacaatcaggaaatggttcccactcctcactcatgatcatgaactctaaggaggctcccagaattgtttagtggcccaaccacatcactctggtcaatggctacgttaaacctccctgatccttgaacctctgaggctcttctgtctctcacctcatgctcacttgatgacctccctcttatgtcacagagaaaatgaaagtcatcagaggtgagctccctcaaccatctgtcaccagatccacacccctccaagaggaacacaatgcatgcagcgcatgtaccttgatttgatcctgatttgaaatatatgcataggctggatgcagtggctcacgcctgtaattccagcactttgcttgagctcaggagttcaaggcaggtggattacttaagctcaggagttcaagacccacctgggcaacagagaaaaaccctgtctctacaaaaaaaaaaaaatacaaaaattagtcaggtgtggtgggtcacacctaaatagtagttccagctacttaggaggctgaggtgggaggatcacttgagcctgggaggtggaggttgtagtgagctgtgattgcactgctgcactctagcctgggtgacagtgagacccagtcaaaaaagaaagaaggaaaggaaggaaggaaagggaggagagagagaaaggaaggaaggaaggaaggaaaaacagaagaaaggaaggaaagaaattaaaaagaaagatatatatatatataaatatatatataaaagacattttgaggctaactggggaatatttgagtatattctgctatcagatgaagtgaagaaatgatcgttattttctaattttgtttttttttttgagactgagtcttgctctgtcaccaggctggaggtcagtggcgcaatctcagctcactgcaacctgtccctactgggttcaagcaattctcctgcctcagcctcccaagtagctgggattataggtatgcaccaccacgcccggctaatttttgtatttttagtagagacggggtttcaccatattggccaggatggtctcaatctgttgaccttgtgatcctcctgcctcagcctcccaaaatgctgggattacaggtgtgagccaccgtgcctggccatgatcattattttcttagctgtgattacgtattgtggttatggaatctccttatttttgggagatgcatgctgaggtacttaggtgtgaagcacatgctttcctatattttcatatggtccaagaatgttttagtagtcactcaacaatttctatgtttaaaaaaaaaaaaaagggctgggcacagtggctcatgcccgtaatcaatccgagcactttgggaggctgaggcaggcggatcacctgaggtcggaagttcaagaccagcctgaccaacatggagaaaccccatctatagtaaaaatacaaaattagcttggcgtggtggcgcatgcctgtaatcacagctactcgggagtctgaggcaggagaattgcttgaacccagtaggcggaggttgcgtacagccgagatcgcgccattgcactccagcttgggcaacaagagcgaaattccatctcaaaacaaaaaactaaaaacaagcccacaaagacgtatataggccttggcactgtggctcatgtctgtaatcccagaactttgggaggccaaagcaagaggatcacctgagtccagtttgagaccagctgggcaacaaggcgataccttgtctctacaaaaaatttaaaaattagccgggcatggtgccatgcacctgtggccccagttacttgagaggctgaggtgggaggatcgcttgagcccaaaagtttgaagctgagatgagctatgatcaggtcactgcactccaccctgtgcgatgaagtgagaccctgtcttggaaaaaaaaaaaaagaaccatatatatatgtgtgtgtatatatatatgtttgtatatatataatatataaatatttgtatatatgtataaataacaattgttaaatctaagtaaaatgatcgacatacaaacaatattgtattatattttcaagttttctgtatgtttgaaatttttcataataaaaaaactgggcaaaattctctcacttccactcactgctcgaccctttcaggctggtgtttatctctaccttgctgctactcaaatgtttttttgcaatgaactttatgtcattaagtccattgtttcgttttcttcttacttgaactgccactagtagctgacgttgctggccagttctttcttgaaacactgtcgttttttggcctccaggatttggcctcttctggcttcctcccatccctccatcggctgctcttccacccctcagccggctcactccgcctttgactgaaatcacctggtcatattggagttcatcaagagaggtcggtcctggaccctcctcttcttatgctaccctttccttctaggggatcacacctgtcctgtggcttcagttcccatcagctggttactctcaaatttatctcttgcctcaaatctccagatttgaccaccttcctgcctggcatccctacttggatgtcccaaaggtattactaacttagcttttttttttttttttttgggagacagagtttcgctcttgttggccaggctggggtgcagtggcaagaccttggctcactgcaacctccgcctcctgggttcaagtgattctcctacctcagcctccggagtagctgggattacaggcatccgccacgacacccggcaaactttttgtattttcagtagagatggggtttcaccatgttggccaggctggtctcaaactcctgacctcaggtgatccacctgcctcagcttcccaaagtgctgggattacaggcatgagccacggtgcccagcttaacttagcatatttgaaacagaagtcatgatcttcccacagaagcagtatcatcctcagatctgaaccacaggggccctgccctggcccacatactttagggggattcacctatcacaaacaacttatcacacacatttattacatgacacctgggcacctctgtcactgatctgctgtcagtgctggaacagcacaacctgaaatcttacacatctgctcttgtaatcaacgccgttcaagccctggggaatggtgacttctgtaatctcttgccctgtatcctggaaacaaaagatgactatagccaattctgtgaaaatctgaggttgtgcctctgcctggattctgaagcatgtactgctttggagtgtagggaggatttaagcagtggaaacatgtaagtgaaatcactttaaccagcttgttaaatattacctctcaaatagcatgacaaagtatcatttcccaatagtgttgagtgtggtttttcttgtttctctttgttttagaggtatggatgtatgttgtgctgcatttacaacagttgcaaaggatagctgaggaacatgttgctgtattaaacaatccttattactgttaaatttatatgcatgtggtgggaggggtggtgagggataaaaaactacacatttacagtgtacactcctcctgtgatgggggcaccaaaatctcagaaatcaccactaaataacttattcatgtaactgaacaccacctgttccccaaaagcctattgaaaaaaaaattgaatacatgtaggtctagatataactcttgtgaagtatgatattgattctttatgttgtaatagatggacattgaatacgagattatgaatacaatcatcctcagtattcaccagggattgattccaaaacccccactgatgttcaaaccccttgtataacatggcatagtatttgcatataacctatgcacattcttccacatactttaaatcatccctaggttatctatggtgcctatcgcaatgtaaatgctgtataaatatatgttatactgtattttttatttgtattattttttctttctttccttccttccttcccttcccttccttccttccttccttccttccttccttcctttctttctttctgacagtcttgctgtgtcacccaggctggagtgctatggcaggatatcagctcactgcaaactctgcctcccaggttcacgccattctcctacctcagccttccaagtagctgggattacaggtgcccgccaccatgcccggctaatttttttgcatttttagtagagatggggtttcaccgcgttagccaggatggtcttgatctcctgactttgtgatccacccgccttgacctcccaaagtgctgggattacaggcgtgagccaccgcgcccggactggccatatatattttaaaaatatttttattcttcagttggttgaatccataggtgtggacctacagatacaaaatgccaactgtagtttaatttttataaaactatctgtcttagtccattcagactgctataacaaaataccttacactgagcaatttataaataataaacactgcttacagttctggaggctagaatgtccaagcaggtggtgccagcagatttggtagccagtgagggcacactttgcttcatagatggcgccttcttgctgcatcttcacgggtggaaggggcaaacaagctcctttgggcctcttttttttaagacagggtctcgctgtgtcacctaggctagagtgcagtggcgtgatctcggtttactgcaagctctgcctccagggttcaagtgattctcttgcctcagcctcctgaatagctgggattacaaatgcctgccaccatgactggctaatttttgtgtttttagtagagatggggtttctccatgttgaccaggcttgtcttgaactaccgacctcaaatgattagcccgcctgagcctcccaaagtgctaggattacaggcatgagccaccgcacccagcctgggcttcttttataacggcattaatcccattcatgaggacaggcccctcatgacctaatcaccttctaaaggccccatctcttaatatcaccacattggggattaggtttcaatttatgaattttaggggggcacaaacatttatgccatagcaatacataataaaaattaataaatatgtatatatttttttgagacagggtctcactctgtcaccaggctggagtgcagtggcacaatcatggctcactacagcctcaacctcccaggctcaggcaatccttctacctcagcctccagagtagctgaggccacatatgtgtgccaccatgcccggctaagttttctattttttgtagagatggcatttcaccatgttgcccaggggggtctcaaaacactgggctcaagcagtctgcccaccttgacctcccaaaacactgggatttcaggtgtgagctactgggcccagcccaaaatttcaaaaaaaagcaggcaaaaagtcagctttatctaaatgtgtttgatttaaaatattgatgtgtattcattatcatttatattttgtccagatgccgtgtctcatggctgagattccagcactttgggaggctgaggtgggaggatcactcgagctcagaaatttgagaccagcctggacaacatagtgagaccatctctctacaaaaactaaaaaaattagctgggtgcgatggctcatgcctgtaatcccagcactttgggaggccaaggcgggtggatcacttgaggtcaggagttcgagaccagcctggccaacatggttaaaccccacgtctactaaaaatacaaaaaattagcagaagaatgcttgaacccatatgtatacatgtatatatacatatgtgtatgtgtatgtttatatatatatgtatatgatacaaaattagccaggtgtggcagcacacacctgtagtcccagctatttgggaggctgagatgggaggatcacttggacctgggaggtcaaagctgcagtgaactgggatcatggcactgtactccagcctgggtgacaacgtgagatcctgccaaaaaaaaaaaggaaaaataaaaagagtgattttacagaaaaattgagattttcaatttatcacggcagtgccagctctgaattcctatgcggcaacgctggaccaggagctgctgcccctctaggaggggagggtgccctccagcctgttatagccttcccttggcacttggcacattacttgcctggcccttacaggaatttgaggtgcaaattgatctagatcattgaaggaagagtctgggtcttctcagttttggggcactttcgttgccaagtaaggttcttatgagatttttagaagttgagattaaaaaagagtttatatgcagctggaggtgatacctaacaacaaccataataacagcatcaacaacaaaaacagtagcctagagcagttactctaagccaggtaagtgttctaaagcacttcacacaacttatttactctcacgacaatgctattaggtagcactttgaatacacacattttgtaggtgaggaaattggggcatgtagctgttaagatttatatcagccgggcgtggtcactcatgcctgttcccagcactttgggaggccaaagcgggcggatcacgaggtcaggagtttgagaccagcctgaccaacatggtgaaaccccgtctctactaaaaatacaaaaattagctggacatggtggcggctgcctgtgatcccagctattcaggaggctgaggcaggagaatcgctttaatctgggaggcggaggttgcagtgagctgagatcatgccactgcgctccagcctgagtgacagtgagactctgtctcaaaaaaaaaaaaaaaaaaaagatttataccaatttataccgtccaataggaggcgtgagactcaacacagggtggaggagagaataggtcaggaaatcacatctctccacctgcacagccaccatcattgtacccttctaaagagactggcaacaactttcattcagcactgtcccattgattggctcatttcatgatcacagcaacccagttaagcaaatcctcacctttgcatcgcctgctttgtatcacttttctttaaaattaaaaataaaaaaaatggattacaaattcggttaacgcccatcccatttctctccttccttgtagtaattatcattctaaagttgttgggaattattcccatgcgtactttgcacttttaaaaaatgtttgctttcctaaacatataccactgttttgtgtattttaaaactcacacaaataatatcatacaacatccatttttgcaagtttcttactcattacattgctaaatatgtctataattcatttaactgctgtatagtatcccattataagaacaaaccatactttatttatccattttacttaacaacagttagcttatttccacttcttcttgacaattaactgatactgcaatgaccatttttatcctcgcctttttgtgcatgtgtagaaatgtttttctaaggaatagatctagaagcaagattgctgggtcatagggaatattcattttcagcattaactggtgccaaaattctcttcaaatttgttgtatctgtttacacttcaacacaaaatatatgcattcctattgtcccacatttttgtcaacagtgttagaataattttaattttggtgattttgtgggtgtaaaatggtaactcgcgctgtgatttgcatttctacattactggttaaattgagcatcttttcttatgtttattgaccattaggtttctcttttgtgactcacctattcacagcttttgctcatattctcttgcgttgtccttttcatatggatctgcaacttctttatgaatcctggatataatcctttgttgtttatgtagattgtgaatattctctaagtctgtggcttgtcttttactttacgtgatttcttttttttttttttttgagacggaatcctgctctgtcgcccaggctggagtgcagtggcacaatctcggctcgctgcaagctccgcctcatgggttcacgccattctcctacctaagcctcccgagtagctgggactacaggcacccactaccacgtccagctaatttttttgtatttttggtagagacggggtttcaccatgttggccaggatggtctcaatctcctgaccttgtgatccacccgccttggcctcccaaagtgctgggattacaggcttgagccatcgcgcccggcctatgtgatttcttataaaagcttaaaaatgttttaacgtggtcatatgtatcaatattttcctttattgcttgtgcatttatttatagtcgacaaataaaaattgtatctatggtgtaacaacatgatgtgtgtatatatatgtgtgtgtgtgtgtgtgtaatggctagagtaattactgtatctgttatctcacatactatcattttaaacgtgatatttgaaatgtactctcctagcaattatttttatttttattttttttttgagacaggatcttgctctgtcgcccaggctagagtgcagtggcaagattatagctcactgcagcctggacctcccaggctcaagtgattttctcttctcagcctcccaagtagctgggactactggcacgtgccaccacatcctgctaattttttcaattttttgtagagacagggtctcactatgttacctaggctagtcttgaattcttggggtcaagcaatcaagcaatcggcatcccgaaatgctaggattacaggcatgagccactgcgcccagctaatttttctattttttttagagatggggtctcaccatgttgcccaagctggtgtcgaactggtctcaagcgatccacccacctcagcctcccaaagtgctgggtttacagacataagccactgcagctggccagcaattttcaagtatacaatacattgttattaactctagtcatcatgttatacaatagatctcctgaatttattctacctaactgaaattttgtatcctttgactaaagctctccaatccctgcccacacccgccccccgccccctagcccctgtgcagccaccattctattctctgcttctgcaattttattttatttatttatttttttaaatttattttgagacagggtctcactctgttgtctgggttggagtccagaggtctgatcacagctcactgcagcctcaaactcttggattcaagagatcctcctgcctcagcctcccgagtagttgggactacaggcacgtgccaccatgcctggctgagtttgactctttaggttccacatgtaaatgaaatcatggtatttgtctttctgtgcctggtttatttcatttagcataatatcctctagttttatccatgttgtcacagatgacagaatttccttctttttaaagactgaatagtattccattgtgtatatgttccataatctctctatttattcattgatggacacttaggttgtttccatgtcttggctattgtgaataatggtgcagtgaacttgggaatacagatatctcttcaacatactgagttcatttctttcgaaatatacctgataatggaactactggatcacatggtagttttaattttttgaggaagctccattctgttttccaaaataggtgtacaaatttacattcctaccaacagtttgtgagggttcctttttctccacatccttgccaccacttgtaatctcttggtttatttttattttttttatcagagccatcttagcaggtatgaggtgatatctcactgtggtttaaatgttcatttccttgataattagcaatattgagcatttgtttttcatatacctgttggccatttatgtgtcttcttttgagaaatgttttttcagatcatttgcccattgtaaaatcagatttttggctggatgcagtggcttatgtttgtaattccagcactttgggaggccaaggcaggaggatcacttgagcctaggagttcaagataaatctgggcaacatagggaaaccctgtctctacaaaaaaattttaaaaattagcagggcacggtggggtgtgcctgtggtcccagctacttgggaagctgaggtgggaggattgcttgagcctgggagttgaaggctgcagtgagttattattgcggcactgtattccagcctgagcaacagggtgagaccccaacttaaagaaaaaaaatcagatttttggttttcaacaactcttgctattaagtttcttataaaaatattcaccccttatcagatgtatagtttacaaatattttgtccctttccgtaggttgtctgttgattgtttcctttgctgttcagaagctttcatttgatgcaatctcatttgtccaaaaaaattattgcccagaccaatgtcaagaagccaagatcatgccactgcactccagcccagcaacagagcgagactccatctcaaaaaaaagatctgaaattgtaaaaatactagaagaaaatataggagaaaagcaattctcctgcctcagcctcctgagtggctgggactacaggtgtgcaccaccacacccagctgatttttgtatttttagtagagatggggcttcaccatgttggccaggatggtctcaatctcttgatcttatgatccacctgccttggcctcccaaagtgctgggattataggtgtaagccaccgcaccccgccatttcagatcttatgtttaagtctttaattcattttgagtagtttttttttttttttttttttttggaggcagtctctctctgttcttcaggctggagtgcagtggtgtggtcttggcaacctctgcctcccagattcaagtaattcttgtgccttagcctcctgagtagctgggactataggtgtgtgccaccacccctggctaatttttgtgtttttggtaggtttcaccatgttggccaggctggtttcgaactcctggcctcaagtaacccattggccttagcctcccaaagtgctgggattacagatgtgagccactatgcctggcctgagttgatttttgtatatgaggtgagatatggtcaaattttattcttctacatgtggatatccagtttccccaggactgtttattgaggagactgtcctttccccattgtatgttcttggcatatttgtaaaggatcagttggccataaaatgtgtggatttatttttggcctctattctggtcttatatgtctgtttttgttccagaaccatgctgtttttattactatagctttgtggcagcttctgaaattaggtagtgtgatggctctagctttgttccttttgttcaagattgctttggccattttggtccttgtcttttgtggttccatatgaatcttaggattttttttctatttctgtgaaaatgtcattggaattttgatagaggttggatggaatctacagtttggggtagtgtggacattttaacaatattaatctttccaatccattaacatggaatatctttccatttatttgtgtctttaatttctttcttcaatgctttatggttttcagtgtacagatttctcacctctttgattaaatttattcctaagtatatatttttgatgctattataaatgtgattgctttcttgatttcttttttggttggtgcattattagtatacagtaatgctactgacttttgaatattgattttgtatcctgcaactttactgaatttattagttctaatagtttttttggtggtatctttagggatttctctatataagatcatgtcatctacaaagtgacaatttaacttctttctttccaatttggatgcctagggagcatcagtggctcaagccagctgtcctggtgcacagggaggcgaggctatgagttcgaggccaacctggtcaacattgaccaatttggatgtcttgtatttctttctcttgcctatctgttctgactagaacttctagtactatattgaatagaaatggtgagaatggttatccttgtcttgttcctgatcttagaggaaaatcttttaacttttcatgattatgtatgatgttagctgtgggtttgtcatatatgggctttattgtgttgagatacactttttctatacctaatttgctaagaatttgtatcatgaaaggatgttaaattttgtcaaacgcctttcccccatctattgatataatcatatagtgttcttcattttgttaactgcttgtacttttgtacttttaaaattttgtataagaaatccttctctattctgatatcatcaatatgtgatcttatattttctttgaatagttttcagttttgctttttactctagctacctgaaatttacttctgggtaggatgtaatgtagaatttattttttgtgtgtttgtttggatagccagttaactcaaaaccattgaactttcccactgatttatgtcacttccattatagccaagtctcatatctttgagggtctgtattagtccattcttgcactgctatagataaatacctgaaatcaggtaatttataaagtttaattggctcatagttccacaggctgtataggaagcatggctggggaggcctcaggaaacttacaatcatggtggaaggtgaaagggaagcaggcatgtcttacgtggctggagcaggaggaagagagggaagaggtgccacacgctttttttttttttttttgagacagagtcttgctctgttacccaggctggaatgcagtggcacaatctcagttcactgtaacctccaccctctgggctcaagcgatcctcccacctcagcctcctgagtagctgggaccacaggcatgcatcaccatgctcggctactatttttgtatttttgtagagatgatgtctcagcatgttgtccaggctggtcttgacctcctgagctcaagtgatcctcctgcctcagcctcccaaagtgctgggattataggcaagagccactgcacctggcctccacacacttttaaacaaccgggtctcatgataacttactatcatgagaactgcacccagtgggaaatccatttccatgatccaatcacctcccaccagaccccatctccaacaaaggggattacaattcgacatgagatttggagagggagggacacagatccaaaccctattaggatctgattcaaaaaagttttgttctgtactgtggtctatttatgtgtgcatataccaggactagactgttttaatcactctaagtttcaaccagtaaacttgtgacatatggttaggcaagggatctcatattcttctgcttcaagttttgttttttcttggccatttactcttccataagaattttaaggccgggtgtggtggctcatgcctataatcccagcacttgaggaggccgaggcgggcagatcacgaggtcaggaattcaagaccagcctgaccaacatggtgaaaccccgtctgtactaaaaatacaaaaaaattagccgggcgtggtggtgcgcacctgtagtcccagctactcaggaggctgagccaggagaatcacttgaacctgggaggtggagcttgcagtgagccgagatcgcgccattgcattccagcctcggtaacagagtgagactccgtctcaaaaaaaaaaagaattttaagaacagtctgtcaagttccataaaatatctgattggagttttgcttagaattgtactgaatttttagatttgagaaaaattatcagctttatatcaaacttccgtctttgtgagtaggggatctcttcctattcttttatatcttctttatgttctctaataaaactttataattttctccataaatatcatacacagactttgttatatttattcctaagtatcttatgatttttgttatgacaaatggtattttcttttctttttttttttttttgagacggagtctcgctctgtcgcccaggctggagtgcagtggcgcaatctcggctcactgcaagctccgcctactgagttcacgccattctccttcctcaacctccccagttgctgggactacaggtgcctgccaactcgcccagctaattttttgtatttttagtagagacggggtttcactgtattagccaggacggtctcgatctgctgacctcatgatccgcctgccttggcctccggaagagctgggattacaggcgtgagccacgatgcctggcctaaaatgaaatcttttatctgtttattgctgtggtgtaaggatattgatgtttgtgtattctccttgcccccggcaaggaaattgttatttctaatagttggtaggttcttgtgaattttctttgtatagtaagcaatctatgtatagtaattgtctatgtatagtgatggctttatttcttctttttcttcttgtgtcacttcagacttcttggcagaaaggtgaatagaaacagtaaaaactggtatccttgtcttgactttggaagttactttctattcctagttagctagattaaaaagattaaaaaagaaatagacaggttctcactatacagtggttattcacagcctcaatcatagagcactacagcctcaaactcccaggttcaacgaaccttaccaccttagcctcccaagtagctgggactacaggcacaagccaccacacctggctaatttttaaatattttgtagttcactacagcactattcacaatagcaaagacatggcgtcaacccaaatgcctatcaatgaaagactagataaagaaaatgtagtatgcagccaggcgtggtggctcacacttgtaatcccagcacttaggaagcctgaggcaggtggatcaggagttcgagaccagcctgaccgacatagtgaaaccctgtctctactaaaaatacaaaaaaattagccaggtgtggtggcaaatgcctgtaatcctagctactcaggaggctgaggcaggagaatttcttgaacccgggaggcagaggttgcagtgagctgagattgtgccaatgcgctccagcctgggtgacagagtgagactctatctcaaaaaaaaaaaaaaaaaaaaaaaaatgccgggcacgatggctcatacctgtaatcccagaactttgggaggccgaggtgggcagatcacaaggtcagaagttcacgaccagcctggccaacatggtgaaatcctgtctctactaaaaatacaaaaattaacagggtgtggtggcactcgcctatagtcccagctacttgggaggctgaggcagaagaatcgcttgaacccaggaggcagaggttgcagtgagccgagattgtgccactgctctccagcctgggtgacagagcaagacaccaccttaaaaaaaagaaaaaagaaaatgtagtatgcgtacaccatggaatactatgcagccataaaagggaatgagatcatgtcctttacagggatgtggatggaactggaagccactatcttcagcaaactaacacaggaacagaaaaccaaacaccacatgttctcacttataagtgggagctgaacgatgaaaacacctggacacatgtgggtggggggaacaataacccactgaagtctgtcagaaggggaagtggcaggagggagagcatcaggaagaatagctaatggataccgggtttaatacctaggtgatgggttgacaggtgcagcaaaccatcatagcacatgttcacctatgtaacaaacctgcacatcctgcacttgtactccggaacttaaaataaaagttgaaaaaatattttgtagagacgaagtctcactatgttgcccaggctggtcttgaacttctgagctcaagcaatcctcttgccttggcctcccaaaattctgggattttagcagtgagccactgcacctggcctccagttctggatcctgggtcttgcgacattattccatgctggcttctgaagtcaatgaggcaaaaccagaaaggggaactaaaaagttaaagagggagagggtctcacaggcaagatggaggaagcctgggatgaaggcagggctgtggacctgaatgatgccaggaattaaggaggaagtaacagtgttaggtaatagcacatgggattcttgggctgcagctacaggagggagaatcatggccttaattcatcacctctgaaatcctgaaatatctagcctcctgcccagatcctgccatgaatgcatctattcaaccactatttataaagtatccagtgttaggtccagggagtggcaagagtgagcatctgcagtcatagtccctgccctcagggagcttacattcaatggggcagacagacatcagtctgtacataatcatcaacaaatgtagaactccaacagggccaagtgcctctgaggaaaggtacaccttagtgtgagcgctcataacaggagaatttgaccctgaaaagaaggtcaggaaggcttccctgaggctattgagaaggtgaggcctgaagaatgaagaggagctaagaggagaggaacagaggaaggagccgttccacagagggtccagcctccctggagactctgtgcaggaggaagcacaaggtggacagcaactggagcacacgagtgagggggtgtggtgggagatgaggctggagaggaggggccaccccttgcagggccttagaggtcaggttaaggacttgggtctttaacctaagatcaatggaaaaccactgaataggtttaaggaggctgactgaaacaatcagatttgcatttttaaaggatccctcttaggtgtgtgtcatactgtagagaaggccattcccagcctcttcagctactgcaatgactcagagaaggccacatggtccacatggtggctagcccagggatgtggagggatgaaaacgagtggacagacttgagatatattagagcagataaaatggataggactaggtgctggattcaatattgagatgctcattctaaaccgcccctacatcaaatccttcgaaggcaggggctatgccacatgactatgatacccaggtcccagaacaactcctgacacatggtagactcaatacacatttcccgaaagggtggaaatgattagcagtctctcaagtaatcctttgaccactaagcgtatttaatttcttctagcatgtgtcagtaatcaacctccttggtacatcatagggagaaatattgccgagttccaaagagtatactctggggcaagttaatacaagaataaggtctcacttaccctataacatgaagagtaacagtaaactcgtaagaacaggacctggtgaagcaaggagtaggcacaggaagatggctcatcaaataggggcgccgggtgtagtgtgaacacctgaggcaggaagaacccagtagcctctgggggttgggtgggattagttgggggactaggatttgatggtagggggttgtcctggagatctctggaaattaagttatctattttttttctgtttttatttttataaaagaactcttaagggcatttttttctttgtttgttctgttttgagatagaggttcactctgtcgcccaggctggagtgcagtggcgtgatctcggccactgcaaactccgcctcccaggttcaagtgattctcatgccttaacctcctgagtagctgggattacaggcatgggccaccacgccttgctaatttttgtgttttttgtatagccagggttttgccaggtttggtcaggctggtcttgaactcctggcctcaagtaatccacctaccttggcttcccacagtgttggaattacagccatgagccatcatgcccagcctaagctatcactttaaaatgacccttcaagaaagtcccaaggagtctaatccatccacgacaacagcacgtctgagacagcctagtgaaatttctccgatggaggacaggagatggaaaagtgccccaggacctcttatttatataaaaaacaaaattttttaagaccctgagaagtatggattcttctccagagaaaagttcctggcttgggagctcccttaggacttggcactttggtctagagtgaagtggacctggccattccagctttgagtgggttcaggcgagacactcgagctaccccttatggttgctctgaaggtcaccctggctgggagtgggtggatctctgctctgttatgcctcccacaggtggaggaagtctgtctctgaggctgccctgccaccctcatagagcgctgcagattgggggcggtgatgcagccacaggggctctgattccctgcctccccactgtgttcatctcattcctctccacatatgaggcctggtgtcatggcaggtgggtgttccaagtgaaaccacagccacagaggcaagcagtagagcctgtccctgatgtggccctggtgatgctgcaccagcctggggctgtatcagaaaccatgcctgcagcctttgcttctgcagacttgctggtgctgcaccagccctgagcaatgtccatagcccttgcctcactggtcactgtgatggggacgcccccaggtatggttctgctgctggtgttgcaggttggagtgggggccagcaccctcatctaccacaagaaggcttaggtggcacagacgtaaggctgcttgcctgtgtgtagagtggcaggctgcaacgggctggagccttggggagaggcccttgccacactggtggcagtgattgggttcaggcaggtgtgtgccgcagtgctgggccaggtgtgagctgtggcaagagctgtggccacactttctgcaggagtagggcctatcacctgtgtgaaagtgttcgcacagggtcaggtgggccccttggctgaagtacttcctatattagggggaggagaagggccccttgcccaggctgtgctgagagaggtgagagcagtgggaagagactccacattccaggcaggaaatttgagtggatttgtgggtggagatgggggtcccgggtaggggagttggggaagggttggttgtgacagctggcaggtaaaggagtgccatagtaggtagagggctgggtctgtcctctcttctcctcctcctctccctttgctcccagcctgcagggagaggggagagaggtgagagcagcatgggggaggaggaagcagaggagacagaggtgggagaggagaggctaagccccacacccaactgaagaagtggttggcggtttcagcggcacctccctcctcgctgaggtggactgtgaaggtggagaagcccagagcacagcctcctgtgagcagcttcccagggtgttgagggctgccaggcaaggacagggccctcagagttaggccttgcctgggcaggggtctcctgggggaaccttccctcagggccctgaggctctgggctccagagctcagcttccgcgttcagatacatggtctgctctgctttggagactgagaagcctgagaggtaaaatcgtgctgggtggtaggtagggtaagggagagggagcttccccccatctccctcacccactgcagaaaggcttctctgtttccttccccagcccagtcccacctcctctgtgaggccgctcctcacctccctactggcctgcagtgatcctcctgcttgggagtcacagagcacccctacacgggccctttgccattctttatagtataaggcaaggccgtaacattttgtggggcatcttcttcagtgtcctcagccttgtgtgaacatcagaagcacttgggggcttgggaaaatgcaattgctggccccatctccagtttcttaaacagcagatctggggtggggcccaagaatttgcatttctaacaagttcccaggcgatgctgatgctgctagtctgggatccacactgggagagccactgatctgttaggcgtgtaactttacttgtattatctctcaattctcagggcaacctgttactctcccccattttgcaggtgaagaaacagagggaagacccagtgccttgtgcaaggtggctcagtttgtaagtggcagagccgatttgaacccacgtttgtctgactctaatactgtatcaaccctccttcctctaccctgttcctctgcattgtcaactattccacatgtatcttgttcctcaacaaaatagtaacgttttcttttgcatactttatatctctcaccttgcctgacccagtaacataggcttggttgggagggactgaaggacttggaaaggaaatgccccagtggagccaggatggaaatgggttcctctgtgtctcccacatggtgtcacctaaataaacagccatgtctgtgaggttcagtcatggggagaggagggcaagagagcactcgcaccaagcgatggggttagggggacacgaaaggaaatgtgataaatagagaggggggcgtgtggggcaaaggtgaggactggggacccgggagggggcaggctgtttcagagtgaaggcaggacgggcagcagagacagagaagaggctgccgggtggttagggctggggaggacaaggagggtgaggacagacgatcccggcagcccctggagccagaagagaagtcaggttaactccagacttttggcttccacctctgtatctcacccaactcctccccacctgcttctctaccctgaaactccaggaacaacgcccacctgcctcccactacaacttccccttataccgtacacgtcctggatgcttggggtccgggaggaggggagtcaggatcacgggttccagggaagtgagtgtagaaaggggctcctacgagggtagaagtgggtgttgtctgcttctgcaggaaaggggccagccagcccaactggtccgcagtacttgctggggctggaggatgcccacctgcatctacgggattgagggtaccggagaggaggcgaacaaacgagaaatcccaagggtggagaagggagccatgggatcggcgggcgggccgcgcagctgcggaactgggagggccaagcgggctttagggggaaacacggccggctcctctgccagtgagacagagaactgagcatgggggaggaatttggggccagaggggctgggggtacccagagcagaggaaacaggaagtgaggggcagagaggttacgggtggtggaaggaacagcagtcggttctggagaggcgattcctcttccccgaatacctgcactgccccggaccgggagtgcagtcgtgcgcccctgtccccccagcctcaggcttggtgcccagccccgctcgcggaactcgaggccagtaaggcagccgcggctttccttgatgcccccactcctctgctctcagccgctgcctggacgagcacagaactagtgttcccaggcgaccctccctccgctcagccccgctgcccggcgggcaaaggctgtgcactcacactccgagtctgcagcccagcctgcccttttttgggaggtggcccggggactgggatgtcgaacagggagcttctccgcagtcctctccacctccctccctctttccagctatagaaaccggctgctcgcagtgacttccaaacatcacggtcattcccacatctacacacatccctttctcttttgagccattttcctgctttccctttggtgttgaaaccctggatttcagcctgggcgactcaggttttaggggggaaagtttggggtctaacttggcacctctgttttttatcctctcttccagcttcatagatggttcctattttcatacatatttgctaatttggagtttccgacgacatatctcgaataacccgacattttctccccatttccaaggctgattttacattatttctaggcctccctccccaatctattttcctttctttttcttgtacacccctgataaacagacacacagaactgcaggtttcaaagaggaaaaaagcacgtttgttgttggtaggcgggcgtgaatgggagggttcttcaccttctccaacacctcgtatagatgggacgttgcagggcaatagaaaaggcagcagatgggggcgtgttttgccccactctgtacaatatagaagaatctcatatagatactttgtataaaagccacgtgtcctcatttgtgtcctcttattggctggctgggctgggggtactgggggacaaagaagctggggtgatagaccaggacacagggataccccatggtccccttcctctggctgtcccctggtggggtcactttggatccttggtgggagcatagcacagctccagtggccgggacaccttccagaatttctcattcaccagctccagggtcagcgagccattcaacgtctgaggagggggtaaaagggagagaggggaaaagagagaggaaagttggagaagatggaaaaggaaatgaatgagaggcaaaaggtgaccaagggaggaggaaagaaaaaaggaataataaaagcgataaggcaaaaaaggacatggatgatgggaaaggagaggggacatagaaagagatagaggatgtataggggaagagtgctgatgagttagaccaggctcatggttctatgtggcccagaccaccctccctcctctcccctcttctaccactgccctcagaagctctcaccgtgaacgccccgcctccaggtgcgatgtagatggtgtactgcttttcactgacgccctccaggctgggcaaagcaggctcctcaggaccgtcacctcctccggcacccccaccctccccgccacacccatcaggtcctccggtgtcagaggcgccccctccaggccctcctggctcccctgcttcctgctgttgcctccgctcgagggcaatgcgcagggccaagtacttggagaggtggtccactgtggcattcccagttgtcttcacatacctggaatgggagggaggacaggcttagagccagagcgcctcagatgaggactggaggtaggggctttccaaaatggattctgggttggggtggtattttgggtttgggcaaagcccacttctgatggaaatctaggtgatctttggtttctcagtggctggggaaagacagggctcctcacctcgtctggcagtattctcccttctccacgagcagggggtggggccggaacacgagctcaatttctccacctggctctggggggctgggggccccaggagggcttggggggcccagcgttccccctcccagagtccctccccggtcaccagagtcttccgaaccggcacccccacccaccccaccagtgccgcctccccctgtccctacactgctcccccctgcgccccctccacggggtcgcttgggagcagggcctggggcagagtcaggggcggagtctgagctcacatcttctccatccccttctccctccccgggctctccttcccccccactcatcgttgtggtctgatctgaccctggtatcggccgcctcacacgctgggccctgtagaagcaagtggttaaggttagaaggcatccaggataaagggcttagactttaaacttcagagaattaagagataagaaaaatcctaatgacgatacctaatatttattaaacacaatgtgctaagcactcagtatactaagtgttttgcaccaatccccttacctaatacaatgaatcctatgacacaggtaattatattacctctattttatggctgaggaaactgaggcttagagaggttaagtaacttgttagtgatcataggctgtcacctctcaaagtgcggtagcagcatacacatcccctgtgagcttgtgaaatgcagactctcgggcccaactctagacctactgaatcacagtttgcatctgaagatctacaggtaatctggatacacatgaaagactgagagatgctggcctaggaggtgatttaacttccagcagtatgaatccggggcttattctcaaaatcgctctactgttctaacttctagaaagtcatggggtaaactacatttttcctttttttttttttgtgacagggccttgttctgtcgcccagcaggctggagtgcagtgtgcagtggtgtgatcatggttcactgcaacatccactttcttcccaggctcaagtgatcctattacctcagcctcccaagaaggtaggactacaggcatgtgccaccatgcccagctaaatgtttaatttgttgtagagatgagatttccctatgttattcaaggtggtctcaaactcctgggctcaagtgatcctcccatcctcacctcccaaagtgctgggattacagatgtgagtcactgtgcccagccctatatttttcttaagaagagcagggccagttgtttactaagaaactgcaatttacacccatgatttccagccctaatgatcagtctgtggtcagctcctaggatgctgaggcttagaagctagcaggcaacaaggactgacccacggacccatcccatcagttctgcttctctcctgaccctcacacctgtgcatggcctgcatgcgtagcccctcctcaatgctggagctcaatgcctgctggttgtgcaggcggctcaggcggataagcactcggtcttgatgggcctcgtattcctcccggctaggatagatcttagagatcagggcatcaaagttggggtctggccgtagggatcgcttggacaccagcttctttcggcaggtaggacactccttgttcctggggtaggagaagggaagccctgagtggtcagtcaagggaactgaagcctaggctgaaccaagaccagtgagagggccctaactttgtaccccttcatctcatctcaaacatgtctctcctattacccgctccgtagggctgtgacaatgcagtcagagcagaatctgtggaggcactccttggtggtcatcgtattcttcagcatgtccaggcagatagggcacatgagttctgaatgcagtgaccgaggggaaacagcaatctctgtgccatccattatggcttcctgaaggcatcagtgagtagaaaggtggtgtgggttagagggaaaggggttttagaaacagcagcccataaaataagaattttgagaaatacagtgagaagacccatgttggtctctataggagacaagaattctgagaaagagaaggactgatgacttggagcaaatggagaaaagacagactttagtgtccattaactaagagtaggagctttggaataggaggatctgaggtggctaagtggcctaggagtgaagatggcacaaatctgtggttgggaaaaactattcaacaaaattttttaaagtcctggtgctacctgtattagaaccccatagggtgcctgttaaaaattcagattctgagaacccaattcactactgaatcagaatgttggggggcatgaagctctgcttttaataaactcccaaagtgagtcttatgtgcactgacttatgacactgaatgaggaacagggaaggtaatttttgtgtttgtgatctttcaaatgaagataataatacttgttccacctctctggcagggctgttttgaggattaaatgagctaaatgcgaaagtgctttggaaagattaaggtgattcaaaggtagggccaggcaaggcagaatagagcaaattacggaaaagaagctgtgtgatgcggtctgtggatataagggtttgggggagggggtaagcctgaaagggagaatgcctgtcacctgcggggtccggtgcagctcatacagactcagttcccacgttttgctggcattctgggcattcgccggcgtcgtcatggtgaccgggcgcagaccccccaccagggctccacagccgaggagaaggcgaagaaggctgggggtggggggaaggggaggagggcgtcaggggggccgcccctcgcgtagaccccgcccctccagaagcgcccctctccgcccccgctcccgcccccgcgccggcactgcccctcacccagctccagccgttcgcgctcccgccgccgccgcgcctctccctaggcccgggctcctgggccaagttcgctcggtccgcaaccgctgctcagacagcagctcccgccaccgccgccgccatggcccgggcgctggggccctacgtcacttccgcctgctcctccgctacacccgctccccccgccggcggagacgtcacccaccattcgcggcgcgggtgggacgggacgtggacgccgcggttctcccgcccacgggacgggctcgtcccgcgtgaggatcctgcgtcccgggagttctgcgccacttagggaaccacggtctccgcccccggcccagcaccgtcgcgcggccaacaaccttagcctcggttcccttccagaggcccccacgcggggcctcagctccggggggccggggcctggaatatctgggaccccaggaggggacagagggctcgtgaaaagggctacctcccccactctgcgtaccctggcgactctggggatcaacccccctcacttctccgtaacccccattccaggatcccgggggaaaaggctgcaaaagatctgccgctttagccttctagtcctgagaacacacctaggtcccgatgtgcccgggattccccttaccaccctggggactccctccaccctctgctttggctctccctagaccctccgacccgctctcccgctcgaggtttgggggcggcggctcgggacgtccagactcaactctcggccggagccatagactcgagaattgcgtttggacaatcaggagccgcggcccggggcggggaagggagggaggcgcacgggaggaaagggggaatggagacaccacgcggaaacagggacatacacaagatggagctcccattgggaagggggggtgcgcgtgtgggtggggtacacaggggcagaatgtctggagtgggaagtgggcagaagcctcttcgaggactctagagtaaacgaaggggatggggaggaaagagaagaggaaggggcagagcgatccccattgagtgtagggaatgagagggatacagggcgagggggtggggggcagttagagaccctgatgggcatcttgtccccgcccgagctgaggctcccggacttgggctgcggctgccagggggtggcctgtccctgggacaaggcagcagtgggtgccctcgccccccaccccagttcccccctacttccctgtcctctccttcagtccgtggccagtccttatgtgggcgccagagtcgattagcgcagacccccctccccttcctcctcctcttcccagccccctccctcctgctctctccagcccctttcatcggctggttcattcccctaatcctggccccctcccctaatcccccccatccgaccccaggccggctgcagctattgtaaggtggagagaaaggggagggggggactcagagaaaggagaggggtgggggagggccacctgttccaagaccccctttcaaggccagactggacaccaagatggggccatgaacaaatcacccttggggaccataagaacccagggagttggggggaggggactggtgctgcagaaccagtggaaaggggtgacgcacgaacccctcccttcaaaaagacccggagtgtcacgcatacacagtgacacatactctttcctctcacacccggcggcgggggttgccctgggagaccaggcagagaaagggaacaatccttcgggaaagggaaaggagggggaggtggggaagggtctgagggcttggacacaagaagagccggaggtggcagggaagaggacttggaatttattagggtcacaagcacccctgcttcccatattcagcattcctgaaccatacactgccaccccttttgtatcctgggaacttagagtcctcatcagcaggaggccaggcagagtggtgggggggtgagcagagtccagggtccttgaggcagttacatgaaaagacctcctgggaggggcagaaacatttggacagatgcatgggtggagacacaaatgggctagggggtacccacttctgtccctggccttgggaacctctgcccttcccagtggctccagactccccttacttgctttctcatatagtctgggttctacttctctgccctctccctccccatgctggcctcataccagtgacttccactgaggtccctgtgatgtatccactatcttcagatgccaagaatgcgaccacatctgccacatctatgagaatggtggggagagggcagaattctgctcactcccatagacccaaaacagccataatctcccaccaaagacatccctccccacaaacctctccacagacaccaaccaccagtcccctagaaaatccccaaactttggggatctcttcattcaggcccccttcccagggaccccactacattcagtgctcaccctcagggtcccccaagtgtcccatcgggatcatttcagtaatctgtaaggaaatactcatgtgggtgaaagcttcttttatggatttttttgaagactgagtctgtgacccttttttgtcttcatttctcatacattcattgaatatttaatgtttgccaggaactgtgcccagtattctctctctctctctctctctctctctgtgaagcccagagagattgagtctctgaatgattctgccctccacccacagcctcctaccttgtccaccactttctgtggcactttctgtgtcatgggtgttgcaatgaaccctgggaggacagagttacagcggatcccatgtctgtgggaaggagagtggctgccgattctggagagggctgaatgctggtacctccctcagaccccccaggtgctccccagcaccctcaagcatctgaccaaccgtccaagctcccgggctgcggtctgggtcagcccaatcactccagccttggatgctgcatagtttgtctgccccacgttccccacctataggtgagtcagagatgtggaatgagtcaggagtctcaaggaggggttctcctctctataccacttggctggctgacctcgtccaactcaacctgacctttcctacgatgctactgatgttgatgatggaaccacgacaaccattggacaccagggcttgtgctgcagcctgagtgactaggaaggtgccctggcgggaaagggtaacaagggagaaaagatcagctggggtgacagccctcctccaactccctccccaggctaagggggccaaacgtcgcaggttcagagatcgccaccttgaggttgacagctatgactttgtcccagtcatcctcagacatgtgcagcagaaactcatcctgggtgatgcccgcacaggacacaacgacagatggtgggcgagaaaagcaggcctatgggagggggaggttacgcatcaaaaaccccccacaaaaagccggggcagtggaggcaatatcagagctttagagggggaaagtggcctagcgttcacctgcacttgttccagcaggcacctggcggccctggcctcagacacgtcagcctggaaggcagcatggttccctcggggcggcccctccttgctccctggcccgcccagcagccgcaccgtctcctgtgccgctgcccggtccaggtcgcaggcagctacggtggccccctctccggccaggcgtacactgaccgctcggccgatgccgctccccgcacctgaggtaggacagaacacgccggaccgggcacggggaggagagggcagggatcagaggtcacagggcagaaagtaaaatgtgggtaaggggccagaggtcacagcggccgcgcactccaagggcacgcccctgacctcactccaataccccaaaccgcccggggaaagaaccccctcaacctgtgaccaaggccagtgcggagcggagtcggttctggagctgagacgccatggcgggctgtgggtgggtgggaatcccagcactaagccaatcccagcgcagaggggcgtggcaagggcaaagccggggccaatcaaaggcccgccagccttaggccatctgcggccaccagcgcaggccgacctcccaccgagggggcgtggcccgacactgctgcttaggggccccgggtgtggagaagacaaggggccccattccccccaaaaagacaaagactgcatgtggggcggaagatcggaggtctttatttccggttaccacccctccccctcgattcaaacacagtgatataaaaggaatagaaacaaaaaaaatcaggccatgagaataccaactaaccctctcccaccccatccccccaatcactcccaaatcaggacacacgattgatgtttgatgtttatccccgactcctcctgttaccctctctgtccaggactctggtcttccctgaagcctccaccaactggtgggagaaaggaaactggaccttggagaacttcctgtgtagcaacttggttctccgagaacaggtggggtaggggacaccaggtaggctgccatcaccccctgtcccttccagccttcttcatggccccatttagccttccaaatgcaacatggtcagacagtgcccaacactatggtccctctggcctctcattctcaccgctccagcctctgtaagactgccagcccttgaaggccctaatgccaaagtaaccattctcccaggctacagttccttcctttggcagatgtccctggccagggcccccaacctctacgcacccctgacctggagttaggggtagaggtttggggcaggggtagtttatccacccctcactcaaggtgggcaatcagcaccatcatgataactccccccagcagccccagcacctccagaagtgattgcaatggtgatgcctccctcagcagctcgggcaacacagacactgttgctacgtagataaagccacctgcagtaaatggcaggacccagccaggacctgcaccacctgcaatttcactgcccactgctcctccttcagtgagaagggcacaggctgtgcctgccagtgcccctactgctgtcagtagttgcagacgcatcgcctgatgggcagaaaagagaaaaaggcactcaccaatagctaaagattatcagtggtttagaagtggctggtggggtataggtataggggacatggatttggaaactaaacatcaaaataaaaagagaagagggagcagtctagaatagacaatttctgaaaaatcttaagagatcagaggtcctttccacagactttctgattgagtaggcgtgtgtgtgtaagactccactaaaccattcagatggtttatagaccagtttaagaaatactgagctaaaggacaaagtaaccagaacttcttccccctcatttctagaggacttgtcaatgacagtatgaattgtttggaactaataagaggctgtttgggtttagggtgagtgaggagagataaagggtttgaggcagctgtgtttggcagacatcaccaacctgctttttgctgcagccagactggaccaagatggcaaagtctccgacctcgtggggcacttcatgtagcaggacagtcattgtggtcaggatccctagtccccggccccctcgaaaggaagccccaatggccagaccatcagtgaagttgtgtgccaagtcagcagccagattcaggtaccccgacacacgcaggtcttgtacaggacaagaagagaaaatgatcagaggcttccatcaccacttgttccagtcttggtcagctattctcacacctcccctcagagaccactttacacccagtcctttagtgtttctcagatacctgccattacccacagcacatattccatgtgatttgtgatgatgtcccttgcccaaatttatcaccaactctggcccttacctaagcctcttttttcttcttcagcgttctgaggtctcactggcccatctttgggtactgtgctccctcctcgcctcttctgaacccctcttgtttccttttcttcttcctctgagctctgcttctccttggtagaacgctctgagggaagaaaagagttggtcagagtggagaacagatcttccaacatgtcctctccctcctgagggccataagatgaggagattctgaggcaggcaagtcagctttcaggaaagttgttcctgggctcaccttgtcttccatgtccatgacttccacgtgtatgactgtgagcgtgtccatgtccatgactgtgaccatgtcctcctttcacatgtctcacaaatttctccacgacaagaaaggcaacaattccactgagaacccacagtcccacagacagaatggggccctggcctgggaatggaggcattgagacattaagggagatgtgcattccagactcctcctcctcaagtgcgggaggtgaggaatagggagagacggaccttccccagcaccccaactcccatccccatctgtctcttcctcaccactgtgggagtgtccatgtccgggttgctccagagtgtggtgagaatgaggttctggaagaaggggggaaaaccagatgagggaatatctgacacaatgagtgtgtatttgggggaatatcgaaaggtcagggatcataaaggagaaagaacccttttcctccaaagaacgaaataggttagatttgaggtagaagtcagaggttacttaccaagagcatgaggaatgaggtgcaggaaagcatctcccaggagcccaccggaagcaaaactgagcaagatctgaagtagagagcgatgccggggagagttcgactccacggggataaggaagaggacaaaaaatggagctgctgagatcagcactgtggcccccagtgcctggtgagggagagtcaaggtcaagtactgtggagtttcccaacaatccagaaccagcccttctctctcccatcccctggagactcacataagcccagagagtgacagcatccaggtcctgcttgatgcctggagccccagactccccatagcctccatggctatgctcatggtcatgtccatgtcctctgtggtagaggctctcatgggagtagccatggctatggccatggtgtaaatcctcatgtgaatgtccatggtcgtgatcgtgggtatgtccatgccagatgctctcgtgagtgtggccatggccatgggcatggctgtggccatggtggaaatcttcatgtgagtgcctgtggctgtggccatggaagtcctcttgcagatcgtcgtgcaggtcgtcatgacccccgagtccagccaccagaagccccaaggtcgcccaggtcagcagtcccacggccacccagtggggggcccccaggcctctggccatcacgctgaccagagggacagaggcagtgactccacttgactcaactctatacctacacagggtccgctttactccaatcgcgccctccgtccacctctatgggccgctctcccattcccttaagttcccacctacattgttcccaagactagttctctttatcccgaaccacctcccggatgtagggccctgggacactaatctttcaccagccactttacagactctctgggccctcgtctctacgactcattaggtgaggaaaaggcctggaaaggatggtagagaaaaaacagagaattctcaccggctccgggatcctctcctttcccggtttgcttggacgtggcagtcccgcctttagatcccgcgagaacaggaagttccgttccaccttcgccctaatgcctttaccaatatggcggcactccggtagcgacgaatccatcctgcactgacacgcatgcgcgagtgtggaggtgatttgaggggagggtgggcgaggcgggctaacaggccggaggagaccgcctcctcggtttccaactagacgagggggcgggaactcgcgccgagacttcccgtctgtacaaagatggctgccacattggcgctgtcattttggtactgagcagagcgacgggcttaattcgacccaatccaggccagagtctttctctcaggggcttcctcgtgctcagctaatcctccgatcaatccttgggaatccctgggacctcttcggtatccctactctcagccagggatcatgtcttgggccgctcgcccgcccttcctccctcagcggcatgccgcagggcagtgtgggccggtgggggtgcgaaaagaaatgcattgtggggtcgcgtcccggtggcggcggcgacggccctggctggatcccgcagcggcggcggcggcggcggtggcaggcggagaacaacaaaccccggagccggagccaggggaggctggacgggacgggatgggcgacagcgggcggggtgagtgccccagcagaagggcaggcgagccagtgaccgctttatctgcgacccctcccccacaccctcccccggtgctcttttccttgcgctcccgcccccttgtttgtaaacacgcgtcccctccctcccgagggccttagcaccctcccccccggggcggggcggggaaggggagcttccgccctcctagctgtgaccgcttgaggccttgggcaccggaggtcgcgggcctgggaagggcacgattcctcttaaacctcaggactttgggcgtttacaggcagatcctgcgtcttaggaggggtctctcctgcctgtctctttcccttgcacgctctggctacctggctttacgctgggaatagaggggctcgatggtctaccccacgtgctgccccacccacgagacaggtgtggctttgggatgacctggtattcattcaaatggattggttggaaaattttcctcacctgaactatcctcctctccttgtcaactccctcctctcaccacaatgaggagttacgctgtttttgggtttttttagccagtcaaatatagcagtgggaggttgtataccaattttagtgacacaaatgttaataagttctgataacccactaccatcggaccagccggagttacactgttgtttgacagcagggtgtctctgaacttggggatgggtggagtgggctgggtccggcacggtggggtattagagaattaaagtctctagttggatgtttgaagactcattttctttttttgtctcttctgtctcttgtgtgtctgtgtgcctgtacatacccctccctcagactcccgaagcccagacagctcctccccaaatccccttccccagggagtccctcccccttctcctcctgggccacccctacccccttcaacagctccatcccttggaggctctggggccccacccccacccccgatgccaccacccccactgggctctccctttccagtcatcagttcttccatggggtcccctggtctgccccctccagctcccccaggattctccgggcctgtcagcagcccccaggtgagaggttgtgaccaacttactgcctggccactttcattttcttgttttccttgtaaccccagatccttgtgtgaacttccccatggcccattgaccttccaatcctctaaccttgtcaggcctgtggtctttatgagaccccttgcctttcctgaggtgactgatctttcagtgcatgcttcctcccctaaaagaactctaatattctttgtttttgtgtgtgtgtgtgtgtttttttttttttttttttttgagatggagtcttgctctgttgcccaggctggagtgcagtggcacaatctcagctcactgcaacctctgcctcctgggttcaagcaattctcctgcctcagcctcctgagtagctgggattacaggtgcctaccaccacgcccggctaattctgatattcttgatgtccttttcatctatctgattttctgcccttttgatcccatctgctttcccaagacacctgcccttcagggtcactgtgttgcacaatttcagggggggcctgtttattcactttggggttgtgctccagggatggcctttcacatagactgcagtgtaaatgacagcctctggaatgtgcattgcagggccttgcttagtggtagggaatgatttccatcacttctgtgacattctgcttcccaataagtcttcctgtgacttccctatttcccccatcccagattaactcaacagtgtcactccctgggggtgggtctggcccccctgaagatgtgaagccaccagtcttaggggtccggggcctgcactgtccaccccctccaggtggccctggggctggcaaacggctatgtgcaatctgcggggacagaagctcaggtatgtggctcagaggatgaacagagagggagagtctgggccatgtatcatcacctgtgggattcccagggcttatggagtttggtcagagcaagtgacctgggggaggcctgatgggagtaaagaagctgaagctgagatgtaggacgcgattggggggaaggtcagagggaaaaggaagcagcgtgtagggtttctgaacagtgaggagactgggactggatcatcactcagctcctggttccctatctctgtatttggcaaacagggaggactttaagttttgctagggggagattggaaacagactaaatggtgaaggtgtctccatgcaaccttcttattgctcctcccctttccctgtaggcaaacactacggggtttacagctgtgagggttgcaagggcttcttcaaacgcaccatccgcaaagaccttacatactcttgccgggacaacaaagactgcacagtggacaagcgccagcggaaccgctgtcagtactgccgctatcagaagtgcctggccactggcatgaagagggagggtaaggacccgccctgcccaggcgtcttagaccacatgcccttctcccttatcccactcagactgtgtacctctctggaagggtggactgctctctctcctctagagggcgatatttgatttctctctcccttcgcagctctcctccctgttaccctgttctggcccttgagtttccttcttaatggttaggcctctgtggcctgcacatatgacccctccctagactgatcctaggataggataacttttccttagccatgatgggctgtctccccatttctaacctgagtggttcctcctctgattccatggaccttctctggtctctgtctcctgttatctgtgatctttcctctaactcctgggactgggcactcttaagcttacagactttactgaagacctcagggcttcccttccttcttctgtgtctccatcttatcttcttaagtcagattcctaggattctgagagacactttagagcatatcttggtcaaaacacccactttagagaagatgagcctgaggcttggctttcccaaggtcatgcaacaaaggagtggcaggcaggtttgggatcagaacccacatcttcaaagacctaggccagtgctcctttcactgcctatttgttgagtcagaagagcacaagatttgcactcagacacacttagagtcagttgtatgacctgccatgtattatatgaatttaagcaaactaatctctttgaaccccgagttcttcatcttaaaaatgagaataaatgcttccagcatcattatgataattgagtgaatggtaaaatgtgcttagcatgtttcttggcatattttatttaaaaaaattttttttttcaatcagctttctcaggttgaatcttggcatgttttttttaaccatgtagtaggctctccatttaaattcctccctaattcttttacctacctcacccttcccgactgacttacctgcccttttataacccttccttcagggctgcccccagtccaccctttctagtgacttccccaattcctataaatatctcccaagggccatgagatcctgatgaggccgtaaggatatttgtggaaccccttcatggctggctgctgactttccattttttctctcccccttccccctgcagcggtacaggaggagcgtcagcggggaaaggacaaggatggggatggggagggggctgggggagcccccgaggagatgcctgtggacaggatcctggaggcagagcttgctgtggaacagaagagtgaccagggcgttgagggtcctgggggaaccgggggtagcggcagcagcgtgagtgttggggtcaatccactctccttcgtgatgggggttgggggaggcagtctaggtctgttctacatcccctccccctcctttcccctcataaccttcctaacactacttgggactggaggtgctgccaaacaaggtctttcaaacatctgaggtggatgtgatagctccttctgtctccactccccaaacaacccactggcagaaccataggcatgtcccaaataaataattgtttgcactaatgccagaagagaagactcacttacagggattggtttggatggggctcacaggaagactatatgtaaggagggggtgtcaaaagcctcttacaagggggctcccagcatatctcaaaatcttccataactcttacccccgtcccctgcagccaaatgaccctgtgactaacatctgtcaggcagctgacaaacagctattcacgcttgttgagtgggcgaagaggatcccacacttttcctccttgcctctggatgatcaggtcatattgctgcgggcaggtcagtgaccttggatccctttgacttcttgacatttgacccctctttgacttcccgatctttagtgaccccagtggccttaccttgcgtacccagggagccaaacttgctgacctcgccacctcttttctccttctcttccactgatgtgctttgaatcccttggcctgatttctggctcctgacccttgctgccccacccaggctggaatgaactcctcattgcctccttctcacaccgatccattgatgttcgagatggcatcctccttgccacaggtcttcacgtgcaccgcaactcagcccattcagcaggagtaggagccatctttgatcggtcagtggccctcggctaggctggcatgtagatagagggggtggggctataggctggtccgtgtccaaggctggctgagctgtgacctttgagtgacctgcaggtccctctccagggtgctgacagagctagtgtccaaaatgcgtgacatgaggatggacaagacagagcttggctgcctgagggcaatcattctgtttaatccaggtaagaggaggattacctttgtctctcaaggccaaggcaaccttggagcctcctcttctccgagactcctaagttacccagctatccccctcagtaagaccctcaacctggaaatctcccaactggccgaggaaaaacccacatccacggatccatcccacaaacccagtgggccctgcttcccttgccaggcctctggtaaagggcaagcaagtgcagcccaaaaggggcatcctgtggctcacatctgcatggccatcctgatttggtttgtcttcatttctcttcctcctctcttccctgccatcccagatgccaagggcctctccaaccctagtgaggtggaggtcctgcgggagaaagtgtatgcatcactggagacctactgcaaacagaagtaccctgagcagcagggacggtgagatggggctggggggcactgaggctcccttgggggtggggagtgctatgaggatgtgttcagggcccgtgtgcttccagctctcaatccccttctcccacctccaccccaggtttgccaagctgctgctacgtcttcctgccctccggtccattggccttaagtgtctagagcatctgtttttcttcaagctcattggtgacacccccatcgacaccttcctcatggagatgcttgaggctccccatcaactggcctgagctcagacccagacgtggtgcttctcacactggaggagcacacatccaagagggactccaagccctggggcagggtggggggccatgttcccagaaccttgatggggtgagaagtacagggcagaaccaagaacataaaccctccaagggatctgcttgatatcccaagttggaagggaccccagatacctgtgaggactggttgtctctcttcggtggccttgagtctctgaatttgtcgggttctcccatgatttggggtgatttctcaccctctgtccttcccccagcacaaagcactggccttgcctccaggaccttgcttccttctcatcttgcctcattttgcttcccatctgaagagtggaaatggggaactcccccagaggtggatactggggggcaggcctcccaagctgatggacatgagagtagggccctgacaggccttcctcctctcaaacctggcagatgggggcctctctggaagagggaggggccctgtcactgtccagagtctctttttacacttcacctccttctgcagtcagactgaaatataaaaaaggtggtggtggtggtgaaggggctggtggagatgtaggaaccgatctgctatttttaatttcctgtgaggatagagacttgcagttagactcaaagaagtactgtactttcccaggttgactaagaaatgccagtggtggaggtgggtgtttgggaaaggcagggccctgaaatggcctgtccctagggctctccaagcactagccttcccagcttcccgccgccccccctatctcttcctgtctaacttggggaaggggcctgggctgtgaggacagggcccccacaggggatggtttcacgagtgtagtcccggaggccttccctttacagctctcctccagccctgggcacatagcataggctggggacacaggatcctggcctgagaattgaggggaggtggccagcccgcagaggtggggtgctggggctgcatgatttttgccctgcgtcccttctctttggggctcctttcccctctcatacataaaatcgctttcaaattaaaatcgctgttttctggactgaggtgactgtatgaggatgggcagcgccgtttcgggcttggggggggtatccggttgggagctccggacgcgatccctggacgccgccgccgaggttccgtggggcccaagaggtgcacgcagggtgggggacacaaggcaagctttgtcggggagggggggagagggtgtgccaggctgggggcggggccggccggaggaggaagggggggcggtggattctcaaaggcgccttgttcgctcgtgccctctccgcgccagcgggcggcggcgcctcggctcgctgcggccttccctccgggcgcgctgcgggctccgggcagacccggcgccgtgcccgctcgtgggggcgcactgggcgccgagcgctgcgtgcttctcaggcgttgcccgcccggaggcggcccacgtccccgagtgaccccatttccctggacccttccaaccagagtcgactgctcgctcatcttaccactgctccccctctacctcggctctgggactccctaaccgcgtcccccatttgcatctccttggacctgactatcctgtgtttgtcggtgggtcccagtctctggcctcttgctctccgtagaacaccttcccccacatcccccgccccagttcgtcgctatctatagccttgtctataaatacccccgccccggcccggctctgtaattacacggggcggggtgagggaagtaattatggagacctgattatgggtggggtggggactgcgacccccaggcccgcctctccccctcccactgtgccctaaatcccgcccaggcctctgctgaaagggggctctgggcccccaagagggagggaatgggagggagtgtgtgtgactggacgtttgggtcctagaaaaggaaggggctagggaagatattggggttcccgaaaagagaatcttagggtacaggccgttgagacctacaaggggcaggagagagcgagcgatagagggagggttcccgcctccctccccaggtggagactgagggtggggtttcccttcggtggctgtgggcgggcggctggaggcgggggccgggccgggggcgggggcgaggtgggggctctgggcgccagggtggccggggacacacagaagcggcagccaccgaggagggagcagtgccgggagccccgacggcgccttgctgcatggagctgggccgctgacagctgtcgctgcccgcagcctctgacctccctgggaccccggcgtctgaggctcatagtctgctccctgtcttctgtcagcctcagggcatccagcgtctcaggccgacctgggtccctgggacccggcgtttcggcttctcagccatggagcggtgcagccgctgccatcgcctcctcctcctcctacctctggtgctggggctgagcgcggccccaggctgggcaggtaagaggagtcctgatgcctgggtcctcggagtcaggctggagctctgagtgtctctgggaaggggccagctgatgcctggggcagcagcttctgagtctaacaaggagatttggggcttcaaggctacaggctggagggcaggacacctgtgttccttggcatcagggtaggaatctctttgtccttgaagtgactgggggagggcagatagggctgaaaggtggaggaccactttagagaccctgaatggggatggatgcttgtcttgagtccttgggaagagctgaagatggccagggccagcccggtccagtcattgctggtgtggggatggtagacgccaatgttgatgggtgaggcgtgtgtgtcttatggcctttctgtcgatatctctgggataaggggtgagcacctgtgattcagagcagagcccagtaagcccagaaagaaaggaagccttgactacctgtctcattggcctcctggacagggtccccctccccctccctgtgccctcgatgctgccacgcagctggctctggggagcactggggctggctgccaacaggacggccctccggacaggccaggatcaggtgtctgaggccagagccaactctttgcattcctgcctagcccctcctccctctggccagccaggctcccctgggaccctggtgcccacaaccctgatcttttccttctttttcccaggacccagaattcctggcttctaggaaaggggatttgatgtcaaggagggggctgtgagcaccaggtcctcagcaggctggaaaaagcccatttctggagacactgagggctgatttatatttaacttgactattcaattcttctctgctttagagagaaaatggtcagaatggcagcacaaaagatttagattagattacagaaggaagaacttccaagatgtgaggacagtgaagcccagggccaggaaattgaggcgtatggtgcctgtagactctaggagtctttcttagggggaagagggatcctctggcatggaggcagggggatggctaagatgactgtttcttatttcaggggctgagtgggtagagatgggactttagggaaatgagttactgtagaattcctaaggttagagaataaggcatttggggggccagaggtagagtggtggagggtaatggggctaccagtggagagcctgtggggcagatgaggctggatacaggggggcaagtatgtggcctggtgtgggaagatggtgggcggacctgtgggtaggttgtccatatgatcgaattgtactcccttgggatttggtggagggtggggacctccgaggtctccttggcctggggtctctgtgagtctctgtgtctctgtctcactcacccttcgtctctcaaagcggcccttgtgtgttggtgtttgcggagctgccacacgcgcaggggccaggcttaggtgggggttgggggggaaggccgtggtttcccggctcctggactcaaagggccttttctctgcctgcccgccccacctcacccaccccacccagctccactctcctgattgctctggcctctgccctgccccacacttctatgaaagttttgctggaactctctttgggatttttccaatctggagctgatggtgtgaagagtatgtgtataggggagcaagtgagggcaaggtgatcttttgttttccagggagtttgagccctaggaagctgagttctagttagacagggctggtgggctggatcttgaatctttgggtcccaggtggtggggttggtgggggtggtgagacaggattgaggttccaggtgtggggagcttgcctgggttctgggcaagcactctgatgggatccacagatgtgtggctcagggccctggacctgttccggctcctcgtggcagcttcagcccctgccccccattcctccacccctccccaactcatctcctaaaccaggaggcacagactcctgggagagctttcttgtatctttttcctcagcatgctcagggttgttcccaccccatcccccaaacctgggatctgtagctgcttgaagcccctctcatagagctgcttctctgatctcttcctcgtggcccccctgcacctcctgtgtccaggatgatcgattgcccagatgttgtttgtgctggagacgggacagatgccagagacccagagagtgagagatatggaaagagagtgagagcgagggagagaaaaagatggacagaatgtgagagaaatggaggaagacagaagagacagagacagaaagaccaacataaagagacagagagagtaagagagtgagagagacaggagacagatgaagagttgagagaagtattcagagagtacagagagagacagattcataagctaaaagacaaagagagagcgtaagagaggcagatgctaggagagacaggggcaggagtgtcatggggttgaatgccagctgatgctgccctgcctccaggtacctttgcatttcccatccattcaggtactgttcagaagcaagtgagggtgaggtgacctttcccttgcagggagtttgagccctggaaagctgagttctagatcccaaatgtcccctatttatgccctcctgagggcatgtcccttctcctgataatcatggactctcccaggtgcaccccctgtggatgtgctccgggccctgaggttcccctccctccctgatggtgtccggagagcgaaaggcatctgtccagctgatgtggcctaccgagtggcacgacctgcccagctcagtgcacccactcgccagcttttcccaggtatgggtgacatggtggggtaggcctggggggaggtaatgggatggggcctaggatcagacaccaggaggaaaggggttgtggcggctccctttgcctctcactctgtgtgtatctctctcggttactaggaggatttcccaaagatttctctctgctgactgttgtccggacccgccctggtctccaagctcccctcctgactctctacagtgcccagggtgtccgacagctgggcctggagctgggccgacctgtccgcttcctgtatgaagaccagactgggcggcctcaacctccctctcagccagtcttccgaggcctcagcctagcagatggcaagtaagtttgtttgctcctctggtctgcctggcccacactttcaggaggaagtgcccccaaacccctacactctaaactgtgaaacccttgagaccctttgggccacaccacacctacccactgcccaaacttcagtcacttctagtccagagtttgggctttagagtgtacagccttctctgcatgttgaactagcctgtaccttgggcaagttacttaaaatttttgagcctcagtttctacatctgtaaaatagacattaaatagaattggcacaaataagaaagtgacggcatggtgtctggtgcactgtaaacactcaataaatggtagccattgttattactgctcttatcaccattggcttcaactcttatcactgctctccaaccatgttgactcccctacttcagtcagccaagagttcacttgaacctcttccaccatttccaggtggcaccgtgtggctgtggctgtgaagggccagtctgtcaccctcattgttgactgcaagaagcgagtcacccggcctctcccccgaagtgctcgtccagtattggacacccatggagtgatcatctttggtgcccgtattctggatgaagaagtctttgaggtaaccagagcaatcagaggcaggattgacttctggtcccctatcttgtgcccactacccttctggccccagcatgtcatcttcctattccctaggccttcatttttttttcttatgaattttcatttctattttctatcttcagggctactgttctctgcaggagaactagatgcctacctatatggcaggactgtccacagccacttactctgtccttcagtcttcatcagttccctcatccatccatcctttcaacccctctctctcctcacccacccatcaattcactcactcctcagccaacctatgcacacatccaccacccactcccccatctatttactcatctatgcatcacacgcccacctagtcatgcatgaaggcttatatccacccacctgtcaatcctccccctgcttaaccactctccccttcaaaccacccatctatgcttccacccatctatcctcttcaactcctccatccagctattcactcacccacccaccctccccatctacccatgcacacaaggatgcatgcatccattcagccaccatctatccattatccttccaccaactcaaccactccctccttcaatatactcactcacccatctcctgacccacttacttcccatccgaccagtcattcacccacataagttcacccatctacctattcacccatttgcttccatctactctgtaacccctgttcatctgcccaccagtccaccctcccatacgtacatttattcattcactatttatcaatgctcccattcattaatgcatgtaagcccccagccacccatccactcatctatccattcatccatccctccattcacccatccctccattcaccctccaagccagtcaacattttctgaatacctgctggacaaggagaacaaagaagagaatataaagtctctatcacccccaagagctcccaggtgggctctggaaatgagacaacatccctaaattacggtgcaatggagagtatgctaagcaccatgtgtgggcaaaagtaaatgccattggaactcaggaatgggttctccccactccatttctagaggtccagagaattctcatcatcactgccattggaaggccaaggcatctaaagctgagccctgtctctggaagccactgtggaagggctcatgcattgccacaaagcgcagaggggaggcaaagaattctggaaggcctgggatctggtcctgattctgccactctgggtgaccttggggcagtcattgcctttttgggcttttctgaatggaacgtatctgaaaaatgggtagaaagaaagatccttgttctgccaactttcctggttgttatgaaggtcctatgagatcccttgaaaactgaaaagggctatgcatatggaggactgacagtgaccttctcccatcttagggttttacctaggattggcctcctatactctttctcccggatgataccctctgcctctctctgaatctctccgctccatctctctcatgtctttgcagggtgatgtccaggagctggccattgtcccaggggtccaggcagcctatgaatcatgtgaacagaaggagctggaatgcgaggggggccagagggaaagaccccaaaaccaacagcctcacagagcccagagatctccacagcagcaaccatcaagacttcacaggccacaaaatcaggaaccccagagccaggtgagggagctgggagaacccccaagtgcagcacaccccagagagggaagacacccaggcatctctcctccttagttgtcctccccaccctcatctccctattcccatcaccccctcctcctagtcctcattcatcagcctttttattttcatctaaaaataaaaagagttgttatgaagaatttgtggctgggagctgtgttccctgctctgcgtctcctcttccagtcttcctggaactgtgtccctgggttttcccttccttctttgaattaagagattgggagacagtgggagaggggtgagagctggggaggcaggtaggagaggggactgaagccaggagaaagcagtcgggatggtgagaccaaggaggaggaatgggaaggagtagggatggagggaatatcaaaggaggggtgggtctgcagaagtgtgggagtggggaacccagtctctggcccccacctacctggaggggcaggaaaaggggaggtagtagggggaagggaagggaagggaagggaagggagcctgggttggatggggtctggagagttagaatacagataggctctggggtcagtggtctaaagatcagagggtcaatctcttaatcatgtctgcttctgccccacatgtggaaccccttccctctgttccacctctccccacctccctcctgaccctcaacctctcctttcatcttcaactctctgtttcccaactccacacctcccccgtttcccaactcccacaccatctttatatctccctctcccgcccttcaccccacaccttccaattaccccatccccttcctgtctatgcccaccccccaatcccagcccactgagtctctctactatgactacgagcccccctattatgatgtgatgactacggggacaacccctgattatcaggtaaactcaagggaccccttcatttcttccctttctcccagcacccccagcaatcatctcctaggacaccttcctcccctcccccatgccgtggggagaggcacagtgtgtttagattatggggatttacttagttcctgccccctccctgtctctctgctgcagcgccctgggagcccccaccacaggcctcccccttcccctagggggcatcggacccctccctgaaagcctaccccacctgccaagaggtcaatgacctggcaggcgtccccctcaccaggccggaggccctctccaactgcaggctttgacccagcatgggagcagcctcccctttcccgatgcccagctcggagggcagcttcccccactgcctggccccgccccaggaccagaggcagcagttaccggcaggtagagccggggcatccagatctctgcccccaaacctctatgaccttggaggttcactctccccaaactatccccctccaaaggggctgcaagatctgagatttcccccatcccccagcacagacagaccctgccctcgggggacaggtgctgctttgcctcccttctgctaacctttctccttccttcccaccccgtgctactcttctccttctctccttggggtcaggaccccaccccaggtgaagaggaagaaatcctggagtcgagcctcttgccaccccttgaggaggtaactctatgccccaccctcaccccatctgggggcagtgggcacctgtgactcactcccctcagcccatgacgtcttgatggaccagcccctcctctggccggagggttcttcctcatttccatcgatggcctctgtctttgggtcactctagaactatgggcctgcttgactctctaagtccagcccgttcccttcagtatccaggcctccttccatgattctttgattcctgagtgacttcgtctccatgttggtgtctaatggtcttactttctatgtcctatttctgttcccgggagccactttctgtccagtgttgtcaccttttgtcttccctatctctttggtcattcctggactcctttgtctgtcattgtgtccatggactgtccactctgcatccagtcctctggccacccttcattttatccaccacttcttcccactggacccactttctggacatctctccccatttttggcctttgatggcccttccatttatatacaaccactcccatggctattcttgggagaaaaaatccagttctgattaaccttggaatcctttgggctagaagttgtcacaccctggggtccagggtaagcctcctctcagccctaacatccccatctacccctctccctccccatccctgggaaggagcagacagatctccaggtcccccccacagccgacaggttccaggcagaggaatatggggagggtggcacagacccccctgaagggccctacgattacacctatggctatggggatgattatcgtgaggagacagagcttggccctgccctctctgcggagacagcccactcaggagccgtaagtgaaaggagcttctctttcattcttgactaccagtgggagctacaagaattgcttcttgttggtttcgatccttggctgttggctgtgagctatttcccatctgtgacttgtcattttctgttcacatatgatgtatatgttgcttgaaaagattactacctgccttcctttgccaaatgtcttaccttgtgactcttgtggatacttctgaagctcagggcaattgggaattaaaaaaaaaaaatatgtagccacttcctgtctttcttgatcacttcctgtctaactgaagctggatttcataaagcttttggtcaataaactactaccttgtgtccattttcagtgtttctctatcatttcttcttggtgaaataattttttgttcatgtttctaccaaacgatctaacttcctatgtcacctttttttaacctacaggccacttattatctgtcccttcctgccttctccagctgtggcatccatcttggtaactgtgtcaggttggactgcaaaggatttattatttctgttctggctctagtttttcatgctatcttgtgacaatttcctttgacaataagccacttcctgtatgtctcaggtcatttaaatcataaagtttccattgtgggcctcgatatttctcatggctacttcctgtgtgtcctagccttgatgtttgtgttttctggaagaattacccttcactgtcatgattccctttgcaggagtcacattctacctgttttgtgcctttcttttctctctgggtcacggtagccatgttgttgttgaaggttcacttcctggatcctctttccttcactgcttcctgtctgttcagccacttcctgtttgtccagtttgttttctagccatgttggccatgtttaattttcttcggccctggcatcattcttgcttccaagtgtttgtcattttgttctgtgtcccttagttgttctcatatcttccagtattccctgtcagtgggactgcttcctgtctactccgctccgtcttctgcctgccttgcagttctggctgcctcctctaccctgctgccgcatcccatacctcccctctcttgcctcccttgagcttctactgcctttcctttatgctgctctctgggtatttggggttgatatgggatttcagagaattttgaaacggatcattgctgtttggtcagaatgaaggtggagaggggcattctgaagatctttgttggggggagttggggtggtggtgaatgtctcccattctccatgttcttattttgtttctggccctagagttgggaacaggtatctgagtggaggtgtgcaagggagggaactggtgggcttggaatgtacttgagggccagaggaagggcaatgcattcagtggggactgctctccaattttttttttttttgaggcagggtctcactctgtcacccaggttggagtgcagtggcaggatcttggcttactgcaacctctgcctcctgggttcaagcgatcctcctgcctcagcctcccgagtagctggggttacaggcatgtgccactgcgcccggctattttttgtatttttagtagagacggggtttcacatgttggccaggctggtctcaaactactgacctcaaataagctgcctgtttcggccccacaaagtgctgggattacaggcgtgcgccaccgtgcctggcctccaaatttacttagagtatggatgcttaacctttggggcatatttaaacttgtgaaccctttgaaatcctaaataaaattctgtgcataatagcatatactttttcatttctggagaaagactcacagctttcatcagattcttttttttctttgagatggagttttgctcttgttgcctaggctggagtacgatggcataatcttggttcacttcaacctccacctcctgggttcaagctattctcctgcttcagcctcccaagtagctgggattacaggcatgtgccaccacacccagctaattttgtatttttattagagacggggttgcaccatgttggtcaggctggtctcaaactcctgacctcaggtgatctgcctgcctccgcctcccaaagtgctgggattatgggcgtaagccacctcgcccggcctagcttttatcaggttctcatgtgggtccatgccctcctcttaccccaaataaaaatctacccacaatcttagagagattcttttatgatgtattggggtaaatgtgtggaaggtttcttaaggttctagggagggagtttgggagatgggatagggtcctctagaagagggtttgggaaggtgggtggtttaaaatccctgaaaggggccaggtgtggtggctcacgcctgtaattccagcactttaggaggccaaggcaggcggatcacctgaggtcaggactttgagaccagcctggccaacacggtgaaaccccatctctaataaaaatacaaaaattagccgggcatggtggtgcacatctgtaatcccagtgtaatcccagctacttgggaggctgaggcaggagaatcacttgaacctggaaggcagaggttgtagtgagccgagatcgcgccactatacttcagcctgggtgacagagcaagacttcgtctcaaaaaaaaagaaaaacaaacaaacaaacaaaaacactggaagtttctggggaccttcctgaaagaggctctcagggagatggagaggttgtgtttgctgaggtggggctgggaactgggggggcagggaaccctgaggtctccttggcaggcttgaaaggtttgtgaagagggagttttaggggagggctgtggggctttcgggtagggctgaagtggtctcgagaggatctaagaatcaaggttggagttgagatggagaaaggcctagtgtcctggctgctcacgggccccactgggggctacatgtgtgtctccttcaggctgcccatggaccccgagggctgaagggagagaaaggagagcctgcagtgttggaacctgtaagttatgctggtcacagggctgaggcagtggaaataggagaagcaagtggggttgagtgtgctggtcctgtcgcctctgatttttaacctttgactccacagggtatgctcgtggaggggccccctggcccagaaggccctgcggtaagtctagcagtgacctggtggccattcttttcttagaaaccccttctatgtgctcatctgagccttccccacatatgcccaggcctcctcctcagaactcgggagcatccctccaatcaacgcttcccagattcccagatctgttctgcacagaccactcctcagccacaggctgagtgtccacacctgtctgaatgcccacacctgacccctactcttttgttcctcagggattgattggtccccctggcatccaggggaacccaggcccagttggagaccctggagagagggtaagggggtgtcctccatgtgacgggggagcttcgggggagctagtggtatccaagcggggggctaccatgcccagtaatttcctgttaggtggcttgttaatgaatgaggggatggttgtgcttcccagcaaccagaaaggagggcagactctggttggggagggtgctgatctggtttctcaccctcaattttccccatgggggtgggagactcaggaaagagctagagcaatctacacttattctgttgaagaggatatttcaaaatcatgctaagatcttgatgtccccttatctttcaccccatcttttgcattctcttcccactccagggcccccctggccgagcagggctccctggatcagatggggctcctggtcctcctggcacatctctcatgctcccagtgagttgtctcttgggttttggaacatgctgatggggaagacaaggaattgtgtcatgttaccaagaaccagatgggcaggaaagatatggaggagtctctaaagatcatcaaagatcatcactccaaagggattcgtctttggggttggggagatggggcctcattaggtgacctagaacaaaacaccagtcttctaggactgggcagaacagcctatatttcaggagctctagaaccaaaagagagtctttctggaggcagaggctggacagtggaggagggcaggagttgagtttctggaatcctctaagtgattatctggaagccatgggaaatgctggatgggcagaacctggggcaaggggcagaaacgctggagaaagcctctggctgggagggtcccatggctttcttggaagagaacctggaccttctctccttgccctcagttccggtttggcagtggtgggggtgacaagggccctgtggtggcggcccaggaggctcaggcccaggcgatcctgcagcaggcgagggtgagtggggctgcttccctggaaagggaaggctctggggggcactggaagggttggctggagtgagtgtgcggcaggggaggcctgggttggtttggggttaacagggaggttggggagaatcctgggcagtggatgaggatcaggagaggaagggtgaatttggagagtgctggggctgggggttcccactgcctgtccctcagctctgctgtccccctgctcccctagctggcgctccgtggaccccctggccccatgggatacacagggcgccctggacccttggtgagtgagcagggtgctcgggtggaggatgctttaattgtgtgtggggtgtggatagttctggaaaggggcttcttttggggaacactccgaggccactgttggctgtgtccttccttacggccatcctctcttctctctcccagggccaacctgggagccctggcctgaaaggagagtctggagacttaggacctcaggtgaccactttcctccactgcacccccatatctgttcaccagctcagtctccctcactcccctccctatgcctcctaaccccaccccatctctcctctcaccagggccccagaggacctcagggcctcacaggccctcctggcaaggctgggcgaagggtgagtgccccaggggtggatgggtgttgtggggagacagggcctgcagggtaggggactgcggccctgcttgttctgacacttcccttgttctcccagggccgggcaggtgctgatggagcccgagggatgcctggagatcctggagtgaaggtaacaggcttgggcccctccctgaagcctgtagccttcagcccacgctgggctcagttgtttcttggggatgacctagttctccaggcttccccaggatcagcacccccccagctcagggtgcagtagggaggggtgggcttggacagggtcgtgtcctcactctggctatccttcctcctcctagggtgaccgaggttttgatggactcccagggctccctggagagaagggccatagggtgagtacattagtgggtgtgtgttgtaattggggatagatcttctatgggagtgaggataggtagggaagggaggctggaggcttggcaggagctcagtgaaagtaatggatgggctaagtgcagaggttcggtgtctgcctgtgttgggggctctgaagcccctcttatgagttcccccattttgcagggtgatactggtgcccagggccttcctggtccccctggtgaggatggagagagggtaagtgtagtggcaaatgtaggggctgggtgcaggggaggtctagaaggcacagcagctttaccgtgtcctcctcctccagggagatgacggggagattgggcctcgagggctgcctggagagtcggtgagtgtccaagggctggtgctgggggagggggctctggggaagccaggagggggacatgagcactaaagggacacagttttatccattcatgccgtctcctcccctcaccgtgaatgcagggacctcgaggtctccttggccccaaaggcccacctggtattcctggaccccctgtaagtgactccctgacttctgaccctgaggtgaccccttgacctctccaactctccacctttctagctgccttcctgctccctctcctctctcggcatgcttcccattccctgtgagctccccctgctctggccccacactgccctgcctcagcattcgctccccgtgcacagggagggccatgtggcgtggtgccctgagggctctgggcataggaaataaatcttcaagaaaaacaaaaccaaagcccacaagcccacagatccacagtcccacacactgcaggcctgggccagctgtgtttgcttgggtttgggatggattggaggtctgaccgtcacaccctcgggaatggccgggcctctgaaaaccacaggtccctccgggccaccttcaggctgctcacacccatcttgtgtttcagggcgtccgaggcatggatggtccccagggccccaaagggagcttggtgagtgatggataggagatcccacccccattcttatcccccgaggtccctgccagcatcctgttggccgccattttgacccctgcctgcttcctgctcttgccttcttggctatcgctgctgggactcagctccatgctctaaatgtgttctatctccatctccttctgacctgtgcctggtcacctgtttctagggaccccagggagagccaggacctcctggacaacagggcacccctgggacccaggtgagcggtgcccctactccgttccccaattttcatgacttcccttgggcttccacaatgggtgagaccctggaaggatacaggaaattaagggtttcaggcccttgttgctcatgctttgaatccgggaggctggatagaagagaccctgggaggcccctgtgacttctctttccctgtatgtagggtcttcccgggccccagggtgccatcggccctcatggagagaaggtaagtgactaagtgatttggaggacagggggtttagagtggggatgtagggagaaccctaaatgtctgctgggattttgtctgtgtccagacatgacccctctagtgaccctgagcctctttgtcttcctgcagggtcctcaagggaagccagggctccccggcatgcctggctcagacggacccccggtgagtgggaccccacttccgaatccagttccccttggccttccaccccagtgcatgacctcagagctcctttagtgacccttgcactgaaaggtcactggtggtgcttgtccatggacagttggcttcactaggtcacaggaaatttgggttggaagaagtgtagggaggggtgcagagagggtgacaggggccactggtcacattttctatcccttactcccagggtcacccagggaaggaaggtccccctggaaccaaaggaaaccaggtgagatcttccatgtctttatcccctgagggagtctccactcagactctagagcctcaaagtccttgggattcccttgtctcattattcatatggctctgccacattctcaattcctgtgccccgtaaccctacccagacagcaatgttgttacttccatttcttccacccctggaggcccccacagtgacactctgaggcccctttataaatgcctctcttttatcttccagggtccctctggacctcagggacctctaggatacccaggacctcgaggggtcaaggtaactgaccaccaggctgggagacaaagggctgtggtcaggggagctatatggggtcttaggagcttggtccttccaacccacctccatcccctgatcagtctacttctatcccctctctaattctagggtgtggacggaattcggggtctgaagggtcataagggtgagaaggtgagcaccatgcccccagcttcccagcacctcagtcctgccatctcctctcttcactgccttccctccagcctgccccgcactgccgtccagctcccgagcccctgcttccacctatgttctcagaattcccattagaaccccagccctctgtcatctgtggtgccctctcacctctatctttctcagggtgaggatggctttcctgggttcaaaggtgacataggcgtgaaaggtgacagggtgagtagagaccccacactggccccaattccgtgttctactgagcctccactctggagacgccaagcaccggtttattctcctgagtctccagactccacagttccagtgctgtgttcccttgggagcctgacccctacaggatgatagccccatggtctgtgtcatgcctgccctcccatcactacactatccctaccctgtgggcttcctgtcctgcagtggctcctgggacccctctagccctcctcagcctcactgttgcccatttctcctctgggcccagagcccacctccagtccccagcactcacctgtccttccctctcacacagggcgaagttggagtccctggttccaggggagaggatggtcctgaggggccaaagggacgcactggaccgactggagaccctgggcccccagggctcatgggcgagaaggtgatgggatgagggttctgtgcctgggtcctctgggggtgtgggcactggggtcaggatgggcatgggtgcccgccgctgaagtcagccagtcagttgaagatggccatgcattagtcatacttctgtctgtgtaaatggcatctctcagctgctgatgggcagaggggatatataagaagtcagggaaaagtccctgacacgaagagttggacggagacgaagcttagagagtagctgttgcttcaaggcagagtgaacatgcgttcggactccaagcagcaggagttctgagatgagagagtctaatagcagtgaggtctgtggtctccagagctgactctccccagcacttgccctgtgccaggtgctgtgctgatgcgtcctatctatcctatgaggtaggcatgtgacgtactgttttgctgaggttttacagaggcacagggatgcttgttgattacatggccagtgaagggcagagccaggggttatgcccaggcagtctggcttcagaatctctgcttctaagccctgctctgcagctgcctgggcaggatgagccctggagcctctggggaagggggcatgcacgggagtcggggtgtggtgggcaaagggcctgcagggggattggtcttggtgaagcaggagtgggtgctggggtagatcccacctccctcatggggtagatggagctgaggttgacatgtgggaagcagctagatcacagtgaccctgaaggacctgatacctctgtaggcgcaggggaggtgggatcccagcactagaattggggaaaatccactcacgggaaggagagacaacaaaagtcaggcagctgtggggcaagcaatgaggggctagaggctggggtgtgtggggtgtgttgctgggtgggggctggctgttatatgtgagggttgaggtctccaggggtggagtggcatctgggcctcctctcactcctaactgcttcctgtccctccacagggcaagctgggtgttcctggtctgcctggctatcctggacgtcagggacccaaggtgatgccatgccccatacgtgcccctcctcctcttccctcctcctcttcgcttccctgatccctgattccagaaagcacagatgcagggcagtgggggaccccagagggaatttagctgacccccattttacagatgaccgaaagaggcccagagagcagcaggggtttgtccaaggccacttagttcttggcagagctcgggtctccctggccactgcctttgtggcctctcctgaccccctttgccccttcctgaaccctacctttcataacttctcaatttccccccttctccgttctcaccaggggtccctaggatttcctggctttcctggtgccagtggagagaagggagcccgggtaagctggggggtgggagggcgtgagaagggaagggctggagaggtgtagagggggtctgtggggagtctcaccctgggtaatgttctctctgcttcattcccaccagggcctgtcggggaagtcagggcctcggggagaacggggccccacggtgagtgcaggggagagaaacaggtggctcaaggtccagaggggggcatttgggtttctctgacaactcctcttccctctgtagggtccacggggtcagcggggaccccgaggtgccactgggaagtctggagctaaggtgaatggtctctacaaggctccaactgccccctgcccactcagccccagctctccctcaacatcctgacctcggggacagctggaaagcagctcttcccactccttgactctgtttccccccacagggaacatctggtggtgatggcccccatgggccccctggagagagggtgagtgtggatcgaaagtccccttcccctgaggtccccagggagcctgggtgagccagctccctcctcaccccaggaaggaagctgagttcccccactcagcccctgcccccattctcctgactccccccacctctgtctctagggcctccctggacctcagggtcccaacgggtttcctggaccgaaaggacccccggtaagttgaccccgagctctgacccacctcgcttctctgagtccttcttccctacctgctttccagctgagagttcacctgacaactgaaccccttccagggcccccctgggaaggatgggctgccgggacacccaggccaaagaggagaagtggtgagtgatgctcctggctacccattctcagggggctccatcagaccctttaaccccagagctgtctggaaagcccacagggacgttctcctggcagagtggagcctgccctggtgctgctcagacccagggcccagggcttggtgtgatcctgcctgggatccttcctcctgggaatctgccccacagcgcccacacctgctttcactgcattctcctctcttcctcgcctagggtttccaagggaagaccggcccccctggtcctccaggagtggtgggacctcaggtaggtttgtccctaggagagaatggacccctgaccctagcattagtctgtctgcccctcttctctcggtcacacgcccctgccccggtccacctgacccagactcctggggctggggtcaatggtgggggctgggatttcaggcaggggtcctgaacttcagtctgttttggggcgcattctcatcgtcttgtcccccaggagaggcagttccccaacagagacacaaggtggtgtagttactccacatggggcaggagaaaacccagcagtggcccaggaatgccggggaatttcccaggagctttggggcagggataaaggggttctgaaggagtgttttagggtggccagggtgggctcttctggcagacagcgagatgaagggcctgagagcaggaactctctctgcttttgtctagggagcagcaggagaaaccggccctatgggggagagaggtcacccaggccccccggggccccctggagagcagggactacctgggacagctggaaaagaaggaacaaaggtcagtgaggggccaggcagaggggaagtgggggagctggggattggggtgctgaaaggaacaggtagttggagatttgagggggggctggagagctctctgtttaatttgggagcatggctgtggctcatcacctctcctttccttttagggtgaccctggtccccctggggccccagggaaggatggtcctgctggtctgaggggattcccaggagagagaggcctcccaggcactgctgtgagtgtgactcccagacccctgcctgtcacaagcaccaagcatcctgagtccccaccccgaccctgtccctgaccccctccatgtcactccccacttccatcttttggagcctgtcttccctctccagctctcacccttctcttttcgtgaagtctcatcttccccaaatgtctggttcatagggtggacctggtttgaaggggaatgaaggtccgtctggcccccctggccctgcagtgagtctggggttccggaagtggtaggaaggacccgggaaaggggtgggtgaggaagggtgggagtggcattctgataccaccaggggctgtggggctgggcagaggctgtccagggacagccagaatgcatctgattttgggagcttttgggaattgtggtctgaggttctctggtatgggcgggctggtgtctccttcctgggggtctgaccatctgctttctcagggctcccctggggaacgaggtgcagcaggatcagggggacccattggtccgccagggcgcccaggcccgcagggtccccctggagcagcaggagagaaaggtgtcccagtgagtgtgggggtattggggaggggtactggggaggggtctgtgagcctagggttgatgggctatgacaagtttcctgtggggtgtttgagggtgagggtcacctccaggccatgactccttcctcctgtcccacagggtgagaagggccccattggcccgactggccgagatggagtgcagggtcctgtggggcttcctggtcctgctgggcctccaggtgtggctggagaggatggagacaaggtgaggggaccccacagaccccgaccaatcttctttccagatgagatggctgacctgggcatgacccctggcccctgtcatgtcatccttcccactctacccatcacctttctctaatatcttgtctgccttctcctcccagggtgaggtgggggaccccggacagaagggcaccaaagggaacaagggtgaacatgtaagtgtccatgaccttgacttctgacctcctggcctttaacctcagtcccacctgatctctctccctgttttggtgtctctgactctcttctcttacccagggccctcctggaccccctggacccattggtcctgtggggcagcctggagcagcggtgagtgacccctccacccccaccgaaggcccagcagcctctggtcctccctcagctcccctctgcccttgtggctgggagtgggagcaggggctctgggcctggcacccagctgtgtgtggtatttgtggatagagaacacctgacccatgacccatccctgtgtccttgtctctgctttccctcaaccctgcagggagcagatggggagcccggagctcggggaccccagggacactttggagccaaaggtgatgaaggaacaagaggattcaatgggcccccaggacccattggcctacaggtgtgttgggggataggacaggggctgagaggtggggtcaggatggggtgatgttttgccccagactctgccagcagcctgccgatgcagactggagggcctgcggagtctgaggggaggggactgtggggcctatctgcctagggctgtgctttgggtggggtcgtcacctgggcccatgttttgtatacttgcacagggtttgccaggcccctctggggagaagggagaaacaggagatgtgggtcctatggtgagtgtgacccctactgaccctagccaccatactagtcacccccctccctggccagcccccaccccacaccccactgccaactccctggcctggctgctcctcctcctctctccaccattcatgctcagccatctcacttcccttcctcatctgtggtgtatctgtttcccccagggaccacctggccccccaggacctcgaggtccagctggacccaatggcgctgatgtgagtcatctcagcccctgtcccttgagaccaatgtgtctggtcttctgcctccctttcccagaccataaactctagtatcgtctcaggggccaagagaagcccttactcccgggaggcctccactgcctcactgctgtaaccttgggctgctcatctgggactttgcccctgaaatggcacctccatcctaagcaatgacacctatttctgttcctcttccagggcccacaaggtcccccaggaggtgttgggaacctgggtccccctggagagaaggtaactgggaagggggtgagtggaccagtcatggaagtgggggatgggagttggatttctgccaattttgggtggggagacaaaagagaatgagatgtggggaatatcagaattttttggctggggaaggagaggaggtttttgactctaatctctttgcagggggaaccaggagagtcaggatctccagggatccagggcgagccaggtgtcaaggtgagtgacagctccaaggccttactccccagtccccgtcacccgcctcaaccctgcctccacttttcctgtgacctccttgagctggaactcctctgcagcaagagtctctgctccctgccatcctctatgaggcctgatccctggtctgagtgagcccttcttcccctttcttgaagggaaggggactagggaactccccttgtaggcttgactttctgtgtatgtcccattgtcactgaggggagtaggggatggctgaaggtgtctcggaagcagaggctgcatccctgatcttcaagattccctgggccatctgtgtcctccgcttgttctgcagggtccacgcggggaacgtggagagaaaggagagtcggggcagccaggagagccagggccaccagggcctaaaggccccacaggcgatgatggccccaaagggaaccctgtgagtttggggcagtgggggctgagtcctctcaggccctgtgaatgacagacctgggaatatgggtgtgtgtgagggaggatcttggagtgtggggagcccgggagtttgggggatgctctgggaatggggcatccagagggatgcctggggtctaggatccggagagaaagtgagagatgccctgcagttaataccttgaggaattagacaacacgcagtgcacgtggtagggaaaggggtgcaggagacctcttcctggggggtactggtgggcactgcctctagagaggcagtggcgtgtgcctgtgggcgtctgtgctgggtgggcttagggagctgtgaccctgactcttattctccatctggatcagggtcctgttggttttcctggtgaccctggcccccctggagaaggtggccctcgggtgagtcttactcagagaagggaaggggcaaaaagggtggggcttctatgggggggtcctctgtgtggccgctgggcttgggtattgggaagccgggggtatggcagggtgggcaaggggatggggtattgacagttttggaggtgatgccagccaggttgggggcccacctctgaccttgcttcacttctgcagggccaggatggtgctaagggtgaccgaggcgaggatggtgagccaggacagcctgtgagtgcctggtgaccccaccacccccctgagcccaagcctcatcctctttacccctcttctgtgccccactcctgaggggtcccttggctggaggataaacactcagccaccccaattcctctctccctagggatcccctggtcccaccggggagaatggacccccagggccacttggaaagcgagtaagtgaggtggacccctgagaccttgggaggcagtccctgggctgtgtgggtggaggctgggcaatggcaggtgggatgggtggggaggtgcctggtgtctgcattgccctgggtgtgtgtgtgtgcaggagctggtgggtttaagggcgtgtggtatctcattgcccggggcagggtgtgtgtgcaggagctggtgggtttaagggtatgcggtatctcattgcactgggcgagtgtgtgtgcaggagctggtgggttgatgggtgtgcggtatctcgggcatgtttgttcctgggttctggtgtgtatgttttcaccaggggtagtggtggttactgacaaagcagaatggaaactggaggaggggctggccagcttttctgtgggccaggggtgaacctttttagtttctggggcaggagacgggccaccaggtagggtgtgggcaagtggcccttcaccaaatgtacagactacccagtattttcacaactgtcacagctgtatctgttctgcacatctgtgaatcggccctcggcgcgtgtccctgtgtatgcacgtgtgtgtgtgcatgtgtatgtgtgtgtctaggacaggaagggggaagagttgagcctggctgcccacggcctcatgtgctcttccttcccactccacctgcagggtcctgctggctcgcctggttccgaggggcgacaaggagggaagggagccaaggtgagggacaggctgccctagtgctggagcatcccctccgcctcccacccctcagatgcctccgtctccagatgcccaccccatctccacctctcccatgttgggcccttatggggacaggcgttccctgtacttgttcctgcgctaggggctcctagagtttggcccttcctccctgcctcctgcctcccaccttggaccctctgccccctgcccacaccccactcctctgccattcaggacacattccttgtgtgtgtttcagggagatcctggcgctataggtgccccggggaagacaggcccggtgggtcctgcaggcccagcagggaaacctggccctgatggtctgagggggctcccaggctcagtggtgagtcactgcagggaagggctgggctggggtgggagtgaggggccatgggaggggtgcagtgtggggatgctcctcctgacccctgtggccccctcaaatcttcagggtcagcaaggccgacctggagctacaggccaggctgggcccccaggtcctgtggtgagtgactgggattgggctgagtgaggggtgagggcagtgccctgggacagagctgaagccctggaggaagtggaggctgttggggagaacttggtcccacctctcccttaagagaatgacttcccatctctccacagggacccccagggctgcctggtctccggggcgatgctggagccaagggagagaaggtgagtgacagacagacacgtggccaggtgtctctcccatcaccctcgcccctgaaacctgtgggacccaagtgcccactgctctgcttcaggcctccggcagccagtcccagggagtccctgctcagtgagggccactcacggaccctgtgcccggctccctctccatgtcctcttggcccttctcccccatccacatgactcctctttgcattctcttgactgcctgcacccttctctagggccacccaggtctcattggactgattgggcccccgggtgagcagggagagaagggagatcggggacttcctgggcctcagggctcccctgggcagaagggtgagatggtgagtagagggcatggtcccggaagttgtgggggttgagagtggggtggagaggggtggagttggagttgggactcagctgtgggtaagcgagcaggtgctcaggagggtgtgggaggaggacccagttgaaccagccactacccttcctagggtatcccaggagcatccggccccattggtcctggaggtccccccggcctccccgtgagtactgcctctgttcctccacaaaatcccctaaacccctctgctgcccacccacagcctcccaacgacttccatggaactaccagcctaacaagcatagtcctcagggtcccccatttgtcctgtcaccaccagtacctcctccccatacttccagggctctgaatgtcctagtattcccacaagactgcccctcctgtagtaacccgaggctcctgtggacttgggaccttgcctccccgctcctctgagtcctgtccttcccctgcagtgaccgtctctttcttgttcctcatttcacagggacctgctggccccaaaggagccaaaggagccacagtgagtgacccccttcagctctgacctttgctccaccccctctggacttgatgatgtctctccaggacaaatagactccccccaaggagccccttattccagccaggaggctgatttgatctttctgtgaccttgatccatgcttgacctcttgacccctccatgacctgatttattccttgtcagggcccaggcggacccaagggagagaagggtgtgcagggccctccaggacacccggtgagtgaggagtcagggctgctcccagggccgtacccctctgctccactgctgccacacttcaccctcacaccaaccttgtctcttgccctctccatctgtccctgcacccagggtcccccaggcgaggtgatccagccactgcccattcagatgcccaagaagactcggcgctcggtggatggaagccgtctgatgcaggaagatgaggccataccgaccgggggagcccccggcagtcctggggggctggaggagatctttggctcactcgactccctgcgggaggagatcgagcagatgaggcggccaacagggacccaggacagccctgctcgcacctgccaggacctgaagctgtgccacccagagcttcccgatggtcagtgctagcctcagggtgcacaaacatctccccaacagcatgggtactgaacaagcagaatggatgctgggggagtcttggtgaaggtgttgggttaagggtgagggctgaggggctgggaactgcagctatttactaaccaggtcagaagtatcccaatactttagcaactgatctgggtcagtgtgtaccagttggttatcagcccagtgtctgcaggagcagataaacatacatacgtgcacacacctgtttgcacctgaacagatgaatctgtgtgagcgcctgcaaccacatgttgtcccagtatgaggctgtccatactcggacctcctccagtcagagggcctggggttactgttgggggcagaggtgtcacgtgatgaaagtgggctgcagcagtaggatgctgcagtagaatccagcagtagggctagattctagggctctgggagggaggaggaccaggagactaagagcatgatggggagggctgggagggaagagggaatgtgggggcaaagagcatcttggagcctggacctaggtggccctgacctcccctctccctcacccaacaggagagtactgggtcgaccccaaccagggctgtgctcgggatgccttccgagttttctgcaacttcacagcagggggtgagacctgtgtgacgcctagggatgacgtcacgcaggtgagagctggcccctcgctgcccctcccctgccccatagtgcaccccctcagggcttagtggtttctgggttttggtgacagtcccctggctgttgccccccccggagcctgccaccccttctccacttcttagctctttcttcttttccttttcaccggtcctctgatgctcactttgcctttcgtgtacccccagtctcctggctcccactcagcccctcacttctttcccagcccttgccttccagccattccctgctcatgactctggctcagctgtcctggtgccgtagatgctcctgaggcccgtctctgtctccctctgaggccagccctctctctccccctctgaggccagccctctctctccttccagttctcttacgtggactcagagggctccccagtgggtgtggtccagctcaccttcctgcggctgctcagcgtctcagcccaccaggacgtctcctacccctgctctggagcagcccgtgacggtcccctgagactccgtggggccaatgaggatgagctgagcccggagactagcccctatgtcaaagaattcagagatggctgccaggtgggaacaggaagagctgggttgggggctgatctcagactcaggctggaggaaggaggtgggaagaccccttgggcagggcacccagggggagcagggaggagtccgtcctgctggattgtcagggatgcctgagggagctcaaaagccggtgaggaaggtggaaaggatggaagccatcgggtgaggttcacttgggtacaaacaccagcgtcacacaggttaatgcagacgtgtacacagactggcacatggctgcccagcagaggcacacggtgggggagaagcaaacacacacgcatgggcacatagacactgccagtctgtacatcctgagtcaccctgatggggccaaggtgctcagaggagaggtgagcctgggcctgaggttagagggtggggggtgcctccatcctgctcacactttcttccttgtctccccctgaagacacagcaaggccggacggtgctggaggtgcgaacgcctgtgctggagcagctgccagtgctggatgcctccttctcagacctgggagccccaccgaggcggggaggggtgctgctggggcctgtctgcttcatgggataggaccgtctctgtctgatcctgtccattcggaaccaggcccacctggaatcccacaacatcagctctgtgccacctcccaagagggctcctcactatctagggagccctgggccagggcgtggagagccctcagtcggggcaggccaggggaggggtgaagtggttgcctggacaccccacgggaggagtggcatctggggctcttggccctcccacctggagcctgttacccgttagagagctgagacccttatttaaaactcacctcccaatcaccccaaacaaatggaagagaagagaaaggacatggcgtattttgtatttaaaagtaattgtattaattatttaaagtgtggaaagcaaaataacaaaaaagagaaacgccaacaaaaatcagcagatgttgaagacaggggtctcgggggtgggctccggcacccacatcctggagtcaggactttcctcagtgactgtgtgtaggggggtttcagggctgaaccccacctccctcccaccttcctcccacctcacctgtcgcacccactgtgaaagttggaatatgtggtctccctggcctcagggctctgactctgccagggtggggctctctaacccacaggtgttggctgcctggcccatgtgcccactgtctcttccacttggtctgggtttggcaggcactgcctgctacttgagggccaggatgctcccccagggaagaaacggaatagtgtggggtgtgtgcagggctgcatcccgcagatggctggaatattaaaattcttctatattggctggtaaattgccatggccctgagccactgagtatgttcattgccacccctgtccctcccctgggcacccctcactttccctgatcctgcaattaaagggttaatgtgtggcatatggaagggactcccaggaccctgtgcccagcttccatgctgactgatggttaaataatgtgattgtctcctcccaggtgtctgtgtcactgcttgtgttgttatttcagtctcccccgacacccatctgatgcttcctcttcccagctaagtggttaccagaattgtatggcttaatccagataccctgcaagccctgtccagctggggtgtcagggcccagagtttacaaagcctgggtgactagcataaaattacaaacaatgccccagggacaccaggtaggggtttggggtccctatggctccagtttctgacacgggtgtgcgattgcttctgggtgtgggtgggacggtgctacatagcccagtctaatctctgtaaatggggaggctgaggcccacttccaagacatttactgcatctgtacctctggtcaccttatccctccccatcagccttgtgctgtgctgtcatgaagacagggctgtggccaagccctccacactcacgtgtagtcacgtgcatactcgttgagtctttgtgttgggtggagtcgcacagtccctgcctgtgtccccccactcttgactgtcccccacttccctagcctccctctcctgggcactcagaagctctgctccctccgggttaggtgtccaagaagtcctctcttccaaggctggccgcgcagccgggaccccctagctggtgcccatggggcttcacattcccaagcagtattgcctggctcctgcctgtcagggcgctgcattaaaacgtgttccagggcctcatcccaatttcctcttcctcaaccctcttcctcgcgggcgccagaatcaagagtgcgtgcctttgtgtcccggtttcgcatccgcggcctcggggcgggcctggcagggctgcccttcaccccgagcccgagcccgggtaggctgcgcccccgcccctcctccccgtacttcttcctcccagcgtgtccccgacagcatcggcttggccgtcccggtcccaacccattctcgatcgcaggaagccccacgtgggcgtctagacggccactctggcccgggcgggtgcgcggaaaaacttctcgagggtggaagcctctcctcggcgctggcgcctccgcctctgccgccccctagtgcccgcgctgagaacgcggccccgcaccgggtcagctgaataatcccggtccctcagacgcctctcccttgtcacccgctgaaccccctgaccccgaaggccgaatggaggaagaagcccctgatctcatctgtcaggggtccggtggtggataggttttctgggatcacccatgctctccatctcaatatccaaggcccaggggcttcagacacccccttccctccctctcagggtcacattaagagaagatcagatctaaataggtgccccccatctgtttctcccgcacccactcccagcctagccgggctggagttgagatttctttggcgctctttctgcagctggagccaaacccgcagaggtcgccccccgaacagcaagaggactttcccaaaggtcacgtttggtcagatgctctgagttccgagggcttttctgcatggaaacaatgctgtacagtcactcgaataacatttatatacggcggctaagtccccaggccaatccacaaaagcctatttaattacacagtgctgccaaccaaccccatctaacagtttcacgagggagtctgtgccaagttgctgttgaggaggccaggcccacagccttctcttggcagctaacttcttcctcccctccagaaagctagagccaggctctaaggaagggtgggaggggtttaagggcagggctgtagaggcggggttttggggtggggctgggtgtgaacagggcaagtgcccaggcctctgggcctgtgggtagtggcagtgtctccattggctggtgggcaatggaggcttctgggtggggtgggaggagatagggaagagaaaggcagaggctttagggaactactttgggtttgattggggcagaacataaactcttgttggaggggccaaattctgaaaagtattgactgcttatggaaggagttgaacttgaacccaaaaactaagagtcatagatggtgtttgaaaaggcaagtgatatgatggaattgtgcgctggcatggtggcgaaggagaggagggtttgggatggggcgcacagggagatcatgtttttttttgttttttgagacagagtctcgctctgtcgcccaggctggagtacagtggcgccatctcggctcactgcagcccctgcctcccaggttcaagcaattctcctgcctcagcctcccggatagctgggactacaggtgtgcactgccacgcctggctaatttttgtatttttaatagagacggggtttcctcacgttggccagtatggtcttgatctcttgacctcatgatcctcccgcctcggtctcccaactgctggggttacaggcgtgagccaccgcgtgggagatcatgtatagagggagggctgtggggtgggtcctctggcctgtcacacccttggagctgcttttcagctttgggcttatatttttagcatctgtaacttatggttaaaaaataacttgtgaaataaaataaaaataacttacagaccacttatatcactgtacctgggagcaccacatatcctagaaggccatgggctacacagagctgttcttgccctcccttggctgtcttgcatgctgaggtttgtagttttgaatggaccagggcaggtgggggtggagatgagacagaggagggagtgagtcaaaacaaggctctcagcctgggcaacaaagcaaaactccttctctctctctctttctctctttctttgagacagggtctctgtcactcaggctggagtggagtggcaagatcaaggttcactgcagcctcgacctccgtgggttccagccatcctcccacctcagcctcccgagtagctgggtctccaggcatgtaccactagtttttgtattttttgtagagatgggattttgccctgtttcccaggctggtctagaactcctgggctcaagagatctgcccatctcggcctcccaaagtgctgagattacaggtatgagccatcacgcacggccctttttctctacaaaaaaataatttaaaaattagctgggcatggtggcatgtgcctgtagttgcagctactcaggagactcaggcaggaggttcacttgagcccaggagtttgaggttgcagtgagctatgctcttgccactgcactccagcctgggtgacagagagataccccatcacaaacagacaaacaaacaaacaaagggctccagctgcctcagaaataagtttctgtgtagtagctggtggccaccttgttttgtggttgtttagcccattttcctgcaagtgtggtgtggtcagcagggagcatcagggccacactggagcttctttctgtcgagctgtgcagttcacagactgtacatgtgtaggccatagctatgtttctcaactcaaacctagagtaagcagaagtcaccttaagtgcttataactggccttctgttatcttttctttcatcttcagagtagtttcatgggaactggcactgacagcagactgccatctcagtagggaagacctgtcctgctagtccttgaataaagaccaaggatatctacatgggcttctcctttagggctctccccacacggccaggatggtagaatgaacacagctctcagcttcagcgagagccagcatatcaccctgtctggctttccctcagttggcaggagcaggtcaatccattttgtgtacttcgctctggcctctctttttttgtttgttttttgtttttgagatagggtctcactccccttgcctaggctagcatgcagtggtgcaatcatggctcactataggcttgacttcttatgctcaggtgattcttccccctcagcctcctgagtagctgggactacaggcgagtgccaccatgcccagctaattttttgtatttttagtagagacgtggtttctccatgttgccgaggctggtctcaaactcctgggctcaagagatccccctgcctcagcctcctaaagtgctgggattatctggcctctcttttttttttttgagatggagtctcgctgtgtcgcccaggctggagtgcagtggcacaatctcggctcactgcaacctccgcctcccgggttcaagcgattctcctgcctcagattcctgagaagctgggactacaggtgcccgccaccacgcccggctatttttttttatttttagtagagacggggtttcaccgtgttagccaggatggtttcgatctcctgacctcgtgatccacccgcctcggcctcccaaagtgctgggattacaggcgtaagccaccgcgcctggcctatctggcctctctttctattaaaaacgccttactctaggttgaaggacttttggttcctgaggcatggatgatttcccaaagtacaacagataaaagccacactggctgtacagcagctcatgtaaaggtcatgttccaggtcttggccacttcacctataacaggcttggactccggcagagcctcaggccaaagaatgtgggtcatagagatatcttcctcattgtgttcacatctcccccgggcctgggctatattgttgggtcaggtaatcggcctgctctcctcatgaaataaggcatactggtattactaatgctgggagagatttcttataattccatcccttcccagttgtggttatttgtattaatacctgcaggttttccttacttttagaactgcaaatctatagaaacaaacaaaccccaaacccaacaaacatgtttcagagacattagggttagggagaagatgagaaatagcaccctgtttgattggggccctggggagagagggactcagacaaaagagtttgagtggcaggtggtctagttttgggtgggttgagcagacttagggccaaaggtggcactgattctagctggcagcgggcctctctgtatttccaactgagagttctccttcccttagcttgtcagggatgctttgcttctgagttgcacacttaacctcagcatcagtttcttcacctgcaaagtgggataatacttgctctgtaaaggaataattccccctttactgacagcctttgcaatggaaagtgaggggagggacctgacaagctgtcttggttccatctccatgtcttggttattgctgacacacgggtgtctggggcatgctgctgtcccttttccacttttgattttagtgctgttaaaactctatacttactattattattttcttgttacaaatcgcaaaatctgattcagaatagcttaagctccaaaaggaattgattgtaaaaatattgggtttctcaggatttgaagacagagttgactcaatagggaagactgagagcagttctgggaacctcaggggctcatggactttgtccctggagtgtggatactcaccgctcagcagagctgctcttgacctctgtgtctctgggccccatggttcaaagtcatggagagacaatctgattggcttagcttgggttatctctgtccctgagaaccaattttctgtggctgagggcccagtgtaccaaccaagaggtatgtaggatgccttttggtggaggtggaggggtgttgggggcactgtttccagataatgtgggatcctgaggcccccaggaggtgtccgcttgctttcccttcttcgcttctgtctaaacagactcctttgtatgcatttgaccagcgtgatacaaccagccccttcatgatcacatttgctctccctgccacccaatctcctggatgggcaacccaaagtcacattcagcagctgtggccatgacctctctaacctcagaggccgacatctctgccagttcatattttgccactttgtgattcagcacataaactttcatggccgttatatccagggctgcattgtgacttctgcgggccctatgcacttttctaaacaataaatttgaaatcatacttatgattgtgttgatacacaggcaactatattaatattatatattaaaatattttcttcaaccttaattttttttctattttaaaagaaatgtaaacattgccatgggagtattgtgggccctaggcactgtggctactgtacataatggatccatgggccctccttgtgtctttgttaaagattttactggtttactcttaaaatgtaatcacaattctgttaccacaattttaataatcattcctgttgtcatcaaatatccagtcagtgttcagatttccaagattgttttgtaggttttgtgtgtgtgtgtgtgtgtgtgtgtgtttgactcatgatccaaataaagctgatggtcttctaattctttaaagatctacattttccgtaatttatttaaagtcctttttgtttacttttattatggacaaatttaagcatatacaaaagtggtttattattgctttttttttttttgagatggtcttgctctgtcgcccaggctggagcacagtggcacgatctcaactcactgcagcaacatccgcttcccaggctcaagcgatgctccagcctcagcctcccaagtagctgggactacaggcgccagccaccatgcccggctaatttttgtattttttgtagagacagggttttgccatcttgtccaggctggtctccaactcctgagctcaagcaatctgctcatcttggcctcccaaagtgttggaattacaggtgtgacccactgagccttgcctgttattgctatcttaaaaagaattaatacatgttaaaaatctttttcagttctaattttgaatacagtaaatatcaataacaatattgtaagtaaagcttttcagtgttttcagtaatttaaggggtttatactcttaaaacattgagagatttttttcaaattgagatttaaaaaaattgggaatcactaatctagaagaactgttaaaaatagtcatgcccacctgtgctcacccttagagatctggattcaacccatttggggcgtgagcaaagggacttgtgtaaaatttccccaggcaattccaaagtgcaggctgtgttgagaacctctgctctaaactggagagatcccgtaagaaataagcagccaggtgcagtggctcatgcctgtaatcccagcactttgggggaccaaggcaggtggatcacttgaggtcaggagttcgagatcagcctgttcaacatggtgtaaccttgtctctactaaaaatacaaaaaattcgccaggtgtggtggcacgtgtctgtaatcccagctactggggaggctgaggcaggagaatcacttgaaccagggaagcagaggttgcagtgaaccgagatcatgccactgcactccagtctggtagacagaatgagaccctgtctcaaaaaaaaaagaaaagaaaagaaaagaaaaaaaaggaaataagcaaagatggccgggtgtggtgcctcacacctgtaataccagcactttgagaggctgaggcgggcggatcacctgaggttaggagttcgagaccagcctgaccaacatggagaagccccatctctactaaaaatacaaaattagtcgggcatggtggcacatgcctgtaatcccagctacttaggaggctgaggcaggagaatcgcttgaacttgggaggcagaggttgcggtgagccaagatcacggcattgcactccagcctgggcaacaagagtgaaactctgtcaaaaaaaaaaaaaaaaaaaaaaaaaaaaaagaaataagcaaaggcacagagtgggaaaggcaaccaaatgccctaggtctgaaagggcctcctgggacctgctgcatccagcagaaatgcttgcaagtgcaggcccagacaacccaaaaaacaggggctaaaataaacaggaattcatttttctcataagaaatctgaggatgacagcttccagcattggtttgagcatttaatgatgccatcagggttccagactcttcatatgtttacactccaccctcctacaatgttacccttacatattttctttggctaaactataagcacgtttttcataatagctgttccatttacatcactgtcaaacatgacattcaccaataaagaaaagacgcatgagacgtgttcggcaccccttagctgtagaaatgcctgccaccactttgctgtcatgaaagagccattttatggctattgcaaatgctttgaagatactaagacttgtacctggaagctatagatgcagtgtgggaaactgggaagtataattgccactgaattgttattgatttattactgcaaataaatctatgcaggtcccttctgaaattgagatggtcctgaactgaacaaatgtcttattgacattcataacagtggctggtattccttctttatcctgtttgtcagtttttggaattcactgattagataaataaaaagaatctcacttgctccttactaatgagctccacggaggggcatgatgttggaaaaggcaccatgcaaggcatgattactaagaagacaaagggcttgtcggggagctgttagggagggtcctgagccagggcttgggaaaaacatctcatcattttactgtatctgatgcttggaagtgacatgtgctttgcaaactccagtttatgttttgatgactttgtgcttgttctgcttggttaggattagcttcagctgtgagaaacagaaaaccctggaaacaacagtgtctccaccaagatagaagttcatttctctctcacatgcaaccctagggctggtgtagtgtttaagtgtcagagactcaggttccttctatctatctttttcttccaccagcctcaacatagctcttctctctcaggtccaatatgactgcttgaattccagctttcatgtttgtgttccagtcagctgaaggagaaaggggaaataaggacaacccctcttttttttcgttttttcttttttttttttttttgagagggagtcttgctctgtcacccaggctggagtgcagtagtggatctcagctcactgcaacctccgctccccaggttctagcgattctcctgcctcagcctcctgagtagctgggattacaggcatgtgccaccatgcctggctaatttttgtatttttagtagagatggagtttcaccacgttggtcaggctggtctcaaactcctgacctcaagtgatccacccgccttggccaatacctttaggcaaagcattatagcaggagtctaaaaacaaatgggctgttttgttttgctcggaaatctctccccgagggattgttttgttttttgaagtatttgaaggctaagtatctagagcttgtgctcatggagtagctgccccctttcctcgtgaggccaccattagttacctctgcatatatgtctgcctctgaggtgtctggctgtctgaggaggcctctggctttgttagtacaccactaggatatttgcaacgtggatcaagactttttaatttaatttaattttattttatttttttgagatggagtctttctctgtcgcccaggttggagtgcagtggcacaatctcagctcactgcaacctctgcctcccaggttcaagccattcttctgcctcagcctcccaagtagctaggattacaggtgcctgccaccatgcctgttgcgggaagtcagggaccccaaatggagggaccagctggagccgaggcagaggaacataaattatgaagatttcattttaatatggacatttatcacttccctaataatgctcttataatttcttacgcctgtctttacttcaatctctgaacataaattgtgaagatttcatggacatttatcagttcccaagtaatactcttataatttcttatgcctgtcttactttaatctcttaatcctgttatcttcacaagctgaggatgtacgtcacctcagggccactattgtacaaattgactgtaaaacatgtgtgtttgaacaatatgaaatcagtgcaccttgaaaatgaacagaataacagcgattttagggaacaaggaaagacaaccataaggtctgactgcctgtggggttgggctaaaagagccatatttttcttcttgcagagagcctataaacagacgtgcaagtaggagagatatcgctaaattcttttcctagcaaggaatattgataattaatactctgggagaataattgcattcctgggggggaggtctataaacagccgctctgggagtgtctgtcttatgcggttgagataaggactgaaatacgccctggtctcctgcagtaccctcaggctcactagggtggggaaaaaccccaccctggtgaatttgaggtcagaccggttctctgctctcgaaccctgttttctattgtttaagatgtttatcaagacaatatgtgcacagctgaacatagaccctcatcagtaattctaattttgccctttgccttgtgatctttgctttgccttttgccttgtgatctttattgccctttgaagcatgtgatctttgtgacctactccctgtttgtacaccccctccccttttgaagtccttaataaaaagctgctggttttgtggctcaggtggacatcatggacctactgatatgtgatgtcactcctggcggcccagctgtaaaattcctctctttgtactctttctctttatttctcagactggccgacacttagggaaaatagaaagaacctgcattgaaatattaggggtgggttccccagatacatgcccagctaatttttttgtgtttttagtagagacagggttttgccacgttggccaggctggtctcgaattcctgacctcaggtgatccacccgcctcagcatcccaaaatgctgggattacaggcattagccactgcacctggccatctcaagatggttttaatggttagaaatatcagccaattgaattttcagagacatatgccacctaattttgtattcaatacttaagtcattaaactccagtggtctatatacctgtttggcctctaagacagtttggcctctaagtctgtgagcactttctgtgatgatggaaatgttctacatttatgcaatttaatgtggtggccactattcacatgtggctattgagcacttgaaacatggctagtgcactaagaaactcaatttgaaattcaattttaattttatttaatttaaatggccacaggtagctagctagtgctaccatattagacagcacagctctgaggctcttttaaggacccacataattcaatgaagagacccaagtttaatacagatgtgggatatgcagtcttcataattcaaacacgccaattaatttctgttcctctttttcaagttgggggctttcaagcacaaaggcttttacctggtcttgggcagaatttttctccccaaaattttaccaaaatttgtgctcttttatagtctgtttcttttaactcataaaattaataatggaagacagaggtttttgatgcagttgctttaaaaaaaaccaggttcaggccaggcacagtggctcacacttgtaatcccagcactttgggaggctgaggtgggcggatcttctgaggtcaggagtttgagaccagcctggccagcatggtgaaaccccgtctctactaaaaatacaaaaattagctggatatggtggtgcgcatctataatcccagctacttggggctaaggcaggagaattgcttgaacctgggagggggaggttgcagtgagctaagattgcgccactgcactccagcctgggtaacagagtgagactccatctcaaaaataaataaataaataaataaataaacaaataaataaataaataaaatcaggtttactgagatataatttaaatacagtgaaaccatagctgtacagttgtttatgagtttgacaaacatattcattgtgtaactactactacaatgaagataatatttctattaccccaaaaagtttcctcatggacacagcttttttcaagtcactcctggttaatgtgtcattaggataataaaacaatgttaattcttgaattggatttaggctgtttaaattttgctcaatggattgtacctcggaggtgggagaatttactctggcaacttagtaaaggttggggctgccaagtgaaggcagactgttggtgaatataatttattgggattgaaaaggatacatcagccagattgatgcatgaatgctaatcaagggttgatttagcaagatcttctactaaggaaataatatcatgtacagtgctaatcacatttttttcataattgagttaaatatttaaagtgattagaatagtcactgccacttaatactacttcagaattagctgcttttcttaatatcggtgtaattcacaattcacttccaagctccacctcccttttgactggccaaaatgagttgttaaagagtcctactctttatctcagatttctccaacaatgttatcataattgttattttacatattctcctagggatttgtcactatttcatattacgttgttttgtggggaagtggaattctagaggttcttaagagcttttccagctcccacagttgcaatcgtaagttcagataacatgcccaggggcaggagaaatcaccatagaagctttcttggttctctgtatctcccattaatgtttcataaccttccaccttcatactttcccctccacataccctggtattcaaaatagcccttcttattagattgggttttcctaattaaaagttgccattgatgttatatcccaaagtttctggaattcctaaacattgtcctttgtctaaactgttttaacgtgagtgcagagtgtctccagacacaggttggaacagatctggagggaagaacattggggctgtttgtcccatcgtatgagaggatctggttttagggcaaagctctttaagcttggagaatgaatcgaaggtgtggaagtgccctgtttctgtatgttctaagagaaatgagctcttaacgtttataagctttttgtcttggcattccccttcggtttggtccctagcactgttaaattacatgaattgagggtttgccaaaactactgctaaatttgcagcttctgtatctgctaaaattggactatttttgatacttcctttaacctgttttgtaaccttgttaattttctaatgagcccattgtgctgttgggattccgatatccccaaatctaatgagccatgaccatacacgttagctccattcccactgggttctcaaattctttttcatttttccaattctttagcactttctcttataggcggttctgccttaatttgaaattaaatgagaacttcagccccttcgtctcaccagctgctagcattttaagtgctcaagagccacctgtggctagtggcggctcggttggatagatacagaacatttccctaacagcagaacattgtataggacagcactgctcaagggattgctctccgatgatcacacccactttacagatactaggactgtctaactatgtacactttctttcttgcaaatacgatgtcgaaggctttccctcagtttgtaacttttaacaaatattttagaatctttattgatcaatctctcatacatctgtgcaacaaaaatatatgtattcatttaattctttaattgacaaaaattgaatctgtttatggtatacaatatgatgtttatatatatatatatatatatatatatacacacacacacacattgtttaatggctaaatcaagctaattaatatgtgcattaccttacatattttttgtgttgggtgagaacacttaaaattattcacttagcaatattcaagtacacagtacattgttattaactagagtcaccatgttgtacagtacatatcttgaatttattcctcctgtctaactgaaattttgtattcgctgatgttagtttttacaatcaactcattaaaaacataattaggtcacagaggttaggaggttttgaaaaaaacaaaaaaccaaacaaaaaatgtaattaggtttgtttggcaatctagcaatgcttagtgtgcaatgctttttacagccgctgctaaaagcatagcaaaaccacagaaatctatgtgctgccaaaacctatgtatttggtcgtatttattttgacttgtgttttttgtgtgcttaactttttctctaacttttttttgtaaagaatgctggagtattcccaaattgttgacaaattcccttgtttcctgttctaagcccagatttcagtgttggccactaggtggggataggatcctatttctctatagccttaacatgattttgaatttcgatgctttgcaatggataatctggctttttcctcgaaagctttaaaacatttcttttgtgaattcaaaacaacccacagttttaattctctgtagttatccaataaaaaggaataggaaacaagtgctaaattatttacttacagtgtttctgtatggaaatccttacccccaagacagctggcttcacggcttgactcaatggtgagaaatctgagttgactcacagctttctgacagtattctgatggtaccatgttaggataaattcttggccaaacagaaaatcaagggagacctgcttctccttgtcaaactctaaattaatctactagttcttttcataaagcaaaaggtgaaatgttgaggactctgagttggcgatcaatcgaaatgacttttaaactaagtcccttttaatgatgactgaagacaatattacattaatcactgggtattataaacactggtttctcagtcctctgctgatgagatttgcttgtttgtgtatttctttcttaaaatcccaaatagtgaagtctctcttaagcaatggaggcttattcatagtcaaattccttgcatgtaaaattctctgggtataaagtagattgcctccctcttgtttttctttttcttgagacagggtctcactctgttgtctaggctggagtgcagtggcattatcacggctcactgaagcctttacctcccaggctcaagtgttcctcctgcctcagcttcctcagtacctgggactacatttattttttgtttttttttatttttttgtagagacaggattttgccatgttgcccatgctggtcaagctatctgccctccttggcctcccaaagtgctgggattataggcatgagccaccaggcccagcctgctttcttctgttttaccaagatgcttgacagtggatatataaaatgacaacttccctttctcatatgtggcactgagagatgggcagcctctatttcctacaagaaatatagaatagaaaatgtgtaatttctcatggtgttctgcaaaaattaaaaatttcacagaacactcatctgaatccctggtttgtaactttggctttccaaaacttgcctatatgctaatatgattcataaaacatttgtaataataatttcaaaataaaaattttaaaatgaatttagtcctatatcttctataataaccaatatttccagaaaagtaggatttaagagtatcttctgtaccaatatatgactttctttttcttttttttggagacagagtctcactctgttgcccaggctgaagtgcagtggtgtgatttcagctcactgcatcattcagtcggccgaaggcctggctagaacaaaaaggcagaaaaaaggtgaattcactctctctctgttttggagtagggagtcctatattctcctccccttggacatcagatctccaggttctctggccttcacactcagggacttgcaccagcagccccccaggtttttggtcttggactcagagttactccaccagctcccccggttctcagcccttcagacttggactgagccatgctacaggctcccctgtctcagcagcttgcagaaggcctaacgtggaactcctcagcctccatagttgagggagtgaatccccagcataaatccccactcatctatctacctatatatatccaataaattctgtttctctgaagaagtctgacttcttcagcccccaaaggcccccaaaggcccccaaagcccccaaaggccctagtgctggtctgttacgaacttcctggtagacaatattttacacatggcatcccagctccttgtgggaggaattaagtgtgtcctgtgtggctccagggggacaggatccttggaagcctgagcctggtttctcttaggctttgcccagtgtgcctttccctctgctgagtttgctttgcatccttttactgtaatgaatcagagccctgagtaggaccatatgatgagccctgtgagtcctcctagggcatcatctcacctggggtggctctgaggacccctaacatagctcttcctctggcattggtatctggtaatatataaaatcccccaaaactaacttgtcatcataatttatgaccatatttcatcaaaatttcatgtagtcacatccaagaagttcagttaagaaagaaaaactctttaagcttggttaaggctctgccatttttgaaaattcgtattaatctaataatattgtagcaactataagttttcctgataactttttttttttttttgggagtgggggatggagttttgctcttgttgcccaggctggagtgcaatggtgtggtctcagctcactgcaacctccgcctcctgggttcaagcgattctcctgcctcagcctcccaagtagttgggattacaggcgcccaccaccacacccagctaatttttgtatttttagtagagacaggatttcaccatattggtcaggctggtcttgaactcccgacctcaggtgatctgcctgccttggcctcccaaagtgctgggattacaggcgtgagccactgtgcccagcctcctgattactattatataaaatttggacttagtggcacatcataacatgaaatgactggagacaatatgacttctctctcggtattaaacatcaattaagatgaattacaaaaatcatagtaaactgtattctaaaaccaagcctatgtctgaaaaatctggtatacacacatcttttgaaactaaggatgtgttttcactgtacaacctgcaagaggtgatctggtgaacatagagttatggaataagtgtgtatctataacttagtacaaattatatataaagagaacgataatgtattatgcggctgggcatggtggctcacttctgcaatcccagcattttgggaggctgaggtgggtggattacttgagctcaggagtccaagaccagcctggccaacatggtaaaacctcatctctaccaaaaacaaaaaattagctctcaggtactctagagactgagatgggaggatcgcctgaaccctggaggcagaggttgtagtaagctgagatcatgccattgcatttcagcctgggtgatagagtgagactccatctctaaataaataaaataaaataatatattatgctattatacctattatttaaaattgggatcttatgttgatttctacatttgggaagcatattcctaagaactgacctttatcagtcctgtattgtgttcagtggcaaagccaggcttggtgtctgttccatctgggaacgccaggagtaatggtcccactccttgctgctgagggtacagcatgaatttgggcagcaccatgaaataaagcaaatgtaagaagatcctctatcagttgcactcctatttaataagaagacttgatcatcatcaagaagttaatttctccatgcctgggtaaaaccacactgactcatcctgaggctcttcattggacccagtgatcaccaaatccttcaagcataaaatggccatgtgattatctccttcctctcaggatgaaaggcagacaataacatgtgatttatgttcctcaggaaaggacatgctataaactagagaacttgggaaagaggaagtacatgaattaacatgcaggcacatggtggcatgtgcctgtggtgccagctactgggcaggctgagtggcagcattgtttgagcccaggaggtgcaggctatggtgaactgagatcgtactactgcactccagcctggttaacagaatgagaccctgtctgtctttctctctctctctctctctctcacacacacacacacacacacacacacacacacacacagaaaataaaggagaaaaagaaattgttcttaaacataaaatttaaagtggggttctttgtatcaccacattctttttttttttttttttttgagacggagttttgctcttgttgcccaggctggactgcaatggtgtgatctcggctcactgcaacctccacctcctgggttcaagtaattctcctgcctcagcccctcgagtatctgggattacaggcacgtgccaccatgcccagctaatttttgtatttttagtagagatggggtttcaccatgttggccaggctggtctctaactactgacctcagatgatccacccgcctcagcctcccaaagtgctgggattacaggcatgagccaccatgcccagctgactcttttaaatttcattcagctgtgcgcccagcctcaccacatttttatatgaagaagaaataaaataataattactaattaaataattaaatattatttccttctccttatatgtttgaaaacatcaaagattttctccaaaattatcatagctataaaagagtcaatataatatcaaatggtaacaaattaattcctttatgatgcaaagaatcaatgtaaaattgtgaagaaatatcatccattcacagaagtaactacaaataaaaaatcccaacttgcgtaatgtatttcctcattaagaagaaggcgattatgatgtcctaattttcgttttcttcacttacccctacactctgcagtagtcaggggcttcctgggccatgctggtgcctgacaattctcccacttcctcccagcagctctagcatcttccttccccagccacagaggcgtcccttctgatgtattctggttggttgagccccatcaggctgtttcatctccagcctttctccctggacaggggtagggaaaggagtgctggattcggagctcctccgtccctgcgccgcctcattttctccttggggtctggcgcacagtggccattgcaatacaccctaaagactgaaggagccagcgcagagccaggatcctcctgtgagccatggccctggctgccctgcttagcctctcggaacctgggccatcaggggtgagtgcgcaggtgggcgagggagggtgggggctctgggcgcttctggagcccacagatgctgttttctttcctgttctgttttctctgttctttactgttttgcctgaggctctcttttgctttctctcattctaacaataataaccaccatttactgaacaccccctaagtgccaaacctcatgtccttcctcacaacaccattttcagaaaggcttttattaacacaattttagaaatgaaaagactgagactcaaagagattcataaatgtctcctttcccccacgtcctctcgctgaagagagaagagccagggcttggcaacctcctctggagattctctcgtagattgtagaggtcagcttcctcaaataggagtctgcaatgtgggtttttttccttccttccttccttccttttctccctccccctcctcctcttcttcttctttttcttcttcttcttttctctctctctctcctctctctctctcgacagggtcctgctctgttgcccaggctggagtgcaatcacgtgatcacagttcactgcaaccttgaactcccaggctcaagggatcctcacacctcagcctcctgggtaactgggactacaggtgtctgtcactacacctggataattatatatatatatatatatatatatatatatttttccccttagagatggagtctcactgtatttcctaggctggtctcaaactcctggcctcaagtgatcctcctgttcagcctctcacagcactaagattacaggtgtggggcaccacacccagcccgttagtgactctctctcatttcattcagtcttcaacccactgcattctccctttttcttccccatgtctctgatgctgctctcagggtgacctttatacaacccaaaccagtgatcacttctctgtctctatctcttgtgtgtcatgagtgtgtttgtgatgcgtccgctcctctttcctggatgttttctcctgtctgttgtcttttatgaacccacttcctctttgttttcctcctactttctagtcttctccttttcagcctcttttttcatgtctgtgtttgtctggatgcaggagcacacactcagacccttgctattctgactttatgtacttttcttgagtgacctgatccaaatttagaacttcacttataatgagcttccttccagtctgtgtcactaacctagtgtaccctgggacccaaccatttagctcactatcctcagattaactccatttgttcccacagaaattcaaactaagcatgttccaaacagaacatcttaccttctctcgattatttcatttttcattacctttgcagtcactgatgccccagttctccacgttgggtattctggactccttcatatccctacttctggcacatgatttagtgattcctgtggcttttcgtttcattattgccattcaaacccatccgctgtccgcctcaccccatgttcctgcccctgcctacaccctcatgacttcccatctgatggctgaagagtcctattggtcttgctttcaaaccagcctcctccaacccatcctccctactgctgccccctccaaacacaaatctcatcatgttactgtcctgcttaagatgcttcacaacttcctatgtcctgtgggataaaatgcaaacacctgccatcagcacacaaggcaggttacagtgccgcccggcgcacatctcccctggcttcagtcacactgaagaactgcagttctccttgcaacttcatgcctctctgctcctgagcctgcttctcctgctggacatgtcatttcccctttctctgttttgctaacctcaggtaaacactatccctaggaacctttcctaaatctcatttttcaaaaatgccctctttatgctcctgagtggctccagtgtatatcttatggtactcagtggtgatcaaaataacctatggaaataaaagattaaaaaacacaaaataaaatacacatgtagcaatcttcttttctttgtctctttggattttggatttcaagcagcttgaggacaaggcccaggtcttctgagttacatccttagtgcctaaagagtgaaaattcacaatgagtgtttatttaacagaatgaaaattaacatttgaaggtggaatttgctttaaaatgcacggacctttagttttaggctttgtgaatataataaaaacaaagtaacctaaggtgaacaaacgacatctctgtagcacagcttgtatatcatgtttttcatctgttttttctttgggcttcgtttctgtaggtgagtaattctctagcccataaactcagtggaggaccctcaacatccgtgtgtgacactgaacttgccgtcacttgacgcatccaaggagaggactggttttccccgtgttgggcttggaggggaaatccttgcttaggaccaacaaccatgcagtgtcatttcgcctcacttcctcttccaggctggactccatgctctctcatctttattcttttactgtaatagtaatagacttttttgttgtcaaccttttgctgcgtcttatacatcaggtaaagctaagatactatcccataggtgtttcaaatgcaacaacttttatttccaggtagaactacacttgaaaatatacattcaacaagaacattttgtgaatgttatgtgcatgacaacatttttaaatttactatgacttaaaatgaaagtgttttgataaaattatataaggtaccatttttattctaaaagtaagaacataacttgaagtctataaatagcactaagacttactctggaggtcttttcatgtccttcattatttttttccctgaaagatttttatttcatctccctacttccctgcctttctctgtggctatatcagtattttttatgtctggtcctgtaggggttctgagatcctatgggaatggggtagggggactacgcaattttgtttctaccaggagttgtgtgacttgggtgagttactttacttctgtggtcagttccccaatatgtaaaataatttcctctgttaaatcaagtttagcctaaagttgcctccttacatattttaagtttggcctaaaggtttctctgtacatcatgaactataacaagtggaggtgtaaacagaccatagcctacacttgtgccaatcactgagttttggccaatcatatgtagctaactgtttgaactgtgttcaagttaggcaaacattgagctgtaaccaatctggctgtttctgtacctcacttctgttttctgtatgttacttttctttttctgtccataaactttcttccaccacgcagctgtgctggagactttgagcatactctggcttgggaggctgcccgatttgtgaattgtttattgcgcaattaacctcatttaaaatttattcggctgaagtttttcttttatcaggtggtgtcagaagtggggttggaagtagagcttctaatgacccccagaagtgctgagtgacctagcgaggtaccctccaggcccattgtgtctctttctctctcggagcagctggggatcgtggtaagttctcttgcagattccgaagctccacagatttgtgtgttgagctctctgagtttctttgagtaaatttctgatcctgattgggtttgaaagtcgcgaaagaaattgaactgagtccaggatcggattggctccagtaattaactggcttggatccggttagagacctcttacatctaactggatcagaaagaaaccagtattaaatggcaatattgcaaaggtgtaaaatttggcttttggaaattcacagagatttttatgttctactcctttatttttcttgtgcacttaggtaggaaaaaaaatcattggctaagttgaacaagggacctgagagcaaagccagtatttgaggtaaaaaatgtgatactgaatttctgaagaactgagttccttctggattatacatgcataagtattaggccctggaaggagcaacgccttacagaaattgtccaggcgtggtggctcacacctgtaatcccagcactttgggaggccaaggtgggtagattgcttgaggctaggagtttgagaccaggctggccaacactgtgaaaccctgtctgtactaaaaattaaaaaaaaaaattagccaggcatggtggcatgtgcctgtaattccagctactcgggaggctgaggcacaagaatcacttgaacccaggaggtggaggctgccatgagctgagatcataatactgcactccagcctgggtgacagagactgtgtctcaaataaaatttttttttttttttttactaaagataacttgcagtagaacattccaaaagaacaacactgcactgaagtgcatttgaaaatgagggctcccaaattagtctcatgtacagtctcatgtagggatgcctattgatatgcagaagcttctaaaaaatttcaatatttgcatttaaagactttacaaaaaagaattaaaaagcttaaacaactaattgatttaaaaaattaaatctgccttgcgctttttgctgatggctgtgtgtgacaggattaggcatgtacaggatcatgggacatggggaacttttttctccccaaagcaggaaacttgagagctgatgagatggctggaaaagatccttcatgactgacaagcagctgcctgaactttttttttttttgaaacggagtctcactctgtctcccaggctggagtgcggtggcacaatctcagctcactgcaacctccgcctcctgggttcaagtgattcttctgcttcagcctcccgagtagctgggattacgggcgcccaccaccatgcctggctaattttttgtgtttagtagagacagggtttcaccatgttggtcaggctggtctcgaactcctgacttcaggtgatccgcccaccttggcctcccaaagtgctgtgattaaaggcatgagccaccgcacctggccctgaacttttaatttagtgtcactgcaataggtgggtccttctctgtcctccctgaactctttgccttccccaccctgctgcagacaatgcttttctttctctctttctcttctttcctttttctatctttcttttttttttttttttgaaacggagtcttgctatgtcacccagcctggagtgcagtggtgcgatctcggctcactgcaagctctgcctccgagggtcatgccattctcctgcctcagcctccggagtagctgggaccacaggcgcccgccaccacgcctggctaattttttttttttttgtatttttagtagagacggagtttcaccgtcttagccagaatggtctcgatctcctgacctcgtgatctgcccacctcggcctcccaaagtgctgggattacaggcgtgagccaccacgcccggcctcctttttccagctttctattatatcttgtctagagatcacatgttgaaacttctggctggaggccattccaccccactttgaatagattaaagatagcagagccccaccaggggcaagtttaagccttaccagttcaatattgggcactaagcagagtggctaatgtctatgttttgtcacatgtattttgctgtggctggaagggaaaatgttaattcagttccctcatgcaatctcttgggcagcatcttacaaaattgagaggcttttgcctatggttccctgaaatcagaaaagatgattttcctttgtgttgtggcttggcccccaggctatgtgcagctaacagggtcgctagggccactcagaaagagggaacccagaagcctggcatgctggcaaaagggtaagaatttcttagcagtcaggcttctggcctctctctgtgtggaaacggttgtaggagtagtaaaaatcactgtctcctctgcaaagttttaattaatgataaaaaggatttgtgaggctgggtgcggtggctcacgcctgtaatcccagcactttgggtggccgaggcgggtggatcacgaggtcaggagatcaagaccaacctggctaacacagtgaaacccagtctctactaaaaatacaaaaaattagccgggcgaggtggcgggcgcctgtagtcccagctactcgggaggctgaggcaggagaatggcgtgaacccgggaggtggaacttgcagtgagccgagatcgcgccactgtactccagcctgggcgacagcgagactccgtctcaaaaaaaaaaaaaaaaaaaaaaaggtatttgtgagccaatcttaagctgtagcaaacctggtgtactttgtgctatgaattggtctttctgtgtcatttggtcataaaaggggttaaataggataaaatgtgggcctaggactcccagaagtctgctgttcaagccagcctggcaaactggtcagttacaaactgcgggtccctgaaacaaaaaaacactggataaggtttccctgtcatcttgttttatgtcattgggagcttgaccttataatcacatgatggtactttcttttggtctccaccctctggaggacaggaattttggagttcatgtcatagttagctctaaaaattatcttgagcagttaaaagcctttgcaagctgaaaattggctgctcttaggctcctccttctgggaggaacaatggaaaccaccaacggtgtagcttagtggctaagctttgccatcttatgatggcagccaggcagggttcaattccagctcagggaatgagacctgtttggtttgatatctttctgatctttgctatttgctgattctcttcccctcatgaacaacttctgactctcgtcttgaattttcctttctctgagctacgtttggaaattctagagtttgtaaaaattgcttgctacctttttgaaaatacttcgtacacttgtggttaagtcataaccttgttaaagcttattggtttcacctgggagattacctttggtaaagttcaaaagccagacatattggctgtttggcctggctaaagtcaagtaataagagatttaaaatgattattttaggctgggcgcagtggtccatgcctgcaatcccagcgctttgggaggccaaggaggatggatcacctgaagtcaggagtttgagaccagcctgaccaacatggagaaaccctgtctctactaaaaatacaaaaattagctggatgtggtggctcgcactggtagtcccacctattcaggaggctgaggcaggataatcgctttaacctgggaggcggaggttgcagtgagctgagattgaaccactgaactccagcctgggcaagagagcaagactccgtctctaaaaacaatcaaataatttttttttttttttagaaagagcgctatagttaaaagtcagcttaattaaaagtggatatccaagctataggtatgtttaaagggccttttggttttttctcttcttggatctttgtttttttttaattatttttttctttttagccaactgaattgtttttctccattttgtcttcttgccacttttgttgcacacatgagaggacctaaggtaacttctaacagcctgggactccttgggaaaaacagaggaggcactacgatcctgctttgggatataactcggttttcctcctgaaacaccaggaatcaaaagcagatagatccctctcaaaatctaaggctaaatatccttttggggatggccaacagggtgaaacccagtctctactaaaaatacaaaaattagcctggtgcagtgctgcacacctgcagttccagctactggagagtctgaggcatgagaattgcttgagcctggaaggcggagttgcagtgagccgagattgcaccactgcactccaacatgggtgacagagtgatactctgtctcaaaataaaggaaagaaagaaagagagagagagagtggaaggaaggaaggaaggaaggagggaaggaaggaaggtcatttccacagttaattgcttaatgctggtgcaatttctgaaaacttcacaagtaggcacaattctagaatatggtgtcttttaggaggttcctgaaaggatggaaaggaccccaaaaagtattcttgattacaggtttctgataactttagaatcatatcatttttactgggtaagaattcctggagctttttttttttttttgagacggagtctcactctgtcacccaggctggagtgcagtggcacgatcttggctcactgcaagctccgcctcccaggttcacgccattctcctgcttcctggagcttaaaagactgactggtttataaaactgccatcccaagtagaacacaaattaattgaataccaagaaaatactttgcaagtctttcatgctaaatcacccaatactgaaattgtttagatacacaatttgaagaaactctgtggtctaactcaaattacctatgataacccatcagttatcagtgctatgcacctcaattggagaaacaaccgtgtcaagcatggactcatggagaaccaaggtggctgccttatccttcctgagcttttaaagcttttataatttaaagttctgcattccatgactcatcatggaaaagataaaatgatccaagttaaatgcatattggtgtggtgacttctaaattgctaaaatagtttatgaccaatgtttggtttgccaaacccatattcctgggaagacaatcaaagcttcaggtacattctgctacctcatgagccatttaaacatttatgaagagatttcagtcaattgtcattttcaatgcatgttttctggttgtgtaaaagctttcctatacaagtgaactgatgttataacagtagattattatttcacagtgtattttcaccaggtaaagaaagctttttatggttcactgactgaggacaatcaaccccttcacaatctagaacctgaagattggatcttctgagaacatcagagaaagactgcccttgccatccacactgcagtaaacatcagaaccgtgaactttggcttcatgatctcacaactgagaaggatccctccacattcttggaaatatacacccattggaacccgtaaggtaaagctaaccagggaagtttcttcccagaagaagatggtatccttgatgtgaacagctttcaccaagatcacagatcaagacttctctgctatatggaggctcttatctctgagtattttttcccttgctgatgcctctatgaacagtagaagtgaaaagggggtctgttgtgtgcacttatggggtaggtatacttttattggtgaagggttttgcagccagccttatacatggataacctcacaccttgatagatgaaagatgaaggcccagtgtaggtgagaaattttaatggtacataggttgcctcataatcagtcagaaacagaacattgattcactcccctattccacatcatgggttaaagagaacattgccaggaggccttcagtcttctagaagggcatttttccttaggtcctttttaccatgatttggagtaaaacaggcaatgattagaaatgtatccctcatgataggctctaaacagagtctactgtaagggcgatggttacacaacagattttacattcttttgtgaaagttatgcttaatagtaggattgctgtagattacttactggctaaacagagaagtatctgtgcagctgctggcacttgtggcctatggagaaatacatcacgtcaggtgtacagagattcagttgtaggtaattaatgaagagactgcttaaatgagtaaactctttatttagctcattctttgatctatttaattttgggtggtttggtttatggggaccctgtgtaaggagcatactccaaactcttggtattatcctcctgatagtcataatagtagtctacctggtgcactgtattctctcgaaagttttaaatgtttgcatgcagccatctctagaatgtcaaattgtctctcttcaactagaatgacaagattgaaagaaatgtgtgaccatgatggcattttaacctatgaatgatgtgttgagactggaaacccaaaatgatggtaactgagagtggcgctaaggccctaagctttggtcacattctcacctaagtgagaacctgaccaaaaaggggacatttttaaacaaaatcatgggaggccattgttttggactttaatgaaaggctaaatgcactaagccccaacagaccagaccaaaccaaaatggagtcacttgtgctaaatgtgacatgattaaactaagactttaaggaaacacatagatcctaaaacagaccaggttttgtttttttctcctataaacagaacgttccaacaaaaggaggtaacccttacaaaaataaaattaaaataaaataaaataacctgaaatccttgttcccccttacaaaactcattgttctgctatttcccagggggtttcaagaccaaataagtacatttacaatggtgatagtggcatcgatgactaaagttttggtaaatctctaaaaattgagaagattaccaaaagaggaaaattgttaaatcaagtttagcctaaagctgcctccttacatattttaagtttggcctaaaggtttctctgtacatcgtgaactataacaagtggaggtgtaaacagcctacacttgtgtcaatcaccaagtttcggccaatcatatgtagccaactgttcaaactgtgttcaaataaggatacacccagctgtaaccaattgggtgtttctgtacctcacttctgttttctgtatgtcactttcctttttctgtccataaatcttccaccacatgcctgcaatggagtctctgagcctactctgcctcgggaggctgcctgattcacgaatcgttcattgctcaatttgactcttttatattgaattcagctgaagtttttctttttttcttttttctgtttttttttttcgagacagagtctcactccgtcacccagtctggagtgcagtggcgcaatctcagcccactgtaacctcctcctcccggttcaagtgagtctcctgactcagcctcccaagtagctgggactacagacagcatgcctggctaatttttgtatctttagtagagacaaagaggtttagtagagacaaaggggtttcaccatgttggccaggctgatcttgaattcctgacctcaagtgaaccacctgcctcggcctcccaaagtgctgggattacaggcatgagccaccgtgcctggccagaagtttttctttgaacactttttttttttggggaaggagtctcgctctatctcccagactggagtgcagtggcgcgatctcagctcactgcaagttccacctcccgggttcacgccattctcctgcctcagcctcctgagtagctgggactacaggcacctgccaccatgcccggctgattacaggcgtgagccaccgcgcctggccttctttgaacacttctacgtggaagtgtgaggattcaatgaataagttgagcacatggtacatgttcagtgaatattttctgattgtgttcagtgttatcattattggaatgatgtgagggttgtgtaagtcttcagagaccagggaaacaactgaaatcttctatgagtcatttctatcattgtttatccccattccttttcttttcattcatttttgcatttctcattttctgtgttattcccttgcattcttaaaaactttcccattacctgcttgcttcttgtattctgtgtactttcctatgtgttcctcattctgcagtcttcttccccttcaagcagcagaccatgtgtcaacgtatgcagagtttgtgcagacacacagaccctctggggagtatatgtttgaatctgatgaagatgagcagttatttgtgcacctggacaagaaggagatggtctggcatctgtgagagtttattcacactgtgaggggcagaaaatgaagggaccagggatggaaagggatgggggacaaaacactaagctggcagtcctaaccccagtgtgtttattctactccaggtgtcaaactttctcagtcagaagttgacataaggaagtcaccagcttcggtctcctttaaatctccaggcctaactttcttttgaatctctgctcttcaaccacaatgacttatgtaccccaagacccctctacctcctggctgcctatgatcctcctgcacctagcactcagcaaagggtctgacatttagatagcactcaatcaatatgaagaatttaaagtgtagtgacaaggtggtgcccacactggatggtctgtatgctgtggtctcatcagggacctttctctgcactgcatttttcctgagaaatcccagagttcaataaatacctgtgtatgtcagagctagacacatctgatgcctttctgtgactccttatattctcagtttcctaggaatgcatatcctggacttgtaattgtaggatacaggtgcattatgggtgcagatacctcagttttgcatcctgcaagagttagtctgcagattgttcactccactctgggtacggctgacacctacagcatgcgtccaggggacaaaaatggaaggagatgactctgattggatagtgagaggaacacgggtagctctggtaaactgaccagggataggcgcccaggggcacacaaggcccagaagctgcttgtgagaagtcagggagaaggaagccaacaactggatgtatcagagagccactgagtgctcattatgtgtatcaggagttaagaatccatcctctacacgaaaaggaaagcttagaccaaacatgtcttctaccttgatttacagtaacttaatatgaaatgcaaaacacataaaaattttggattgtaaaaaaaagatcagtgtttgaaagagtgccacacctattgctttgcactttcaacaatggggaggcgtttctcactgtatgaattattagctcaggaggtctaggctggtgaatgaatgcagacttagaggataaatgtcgtctacttgatgcattcaaaaggccaagcaacatttggttaaggagtatttgtgatggcatgcaaagaaagtgttgaaagtgtgttagattatatttatcgttttaaattctgatgcttatttaatttcttaacagtaatgctaaaacatgctcttagtaagttatatgttgaatcagtgctatgttaatatgggccctataacacagatttgcagtctgttcaccactgaatagctaagaatagtggtttcagacctaaatggatgaagacaccaaacatgaggatggggcagctcactgaaatatagtaaatccaggagaggtctatgtccaacaggccaccttatacaatagtttggatggattttcatggttttcttctttcttatgtctaaaccacaatgaacttctttattaactcttactgtttgctaaaaccctcaagaaaaaaaagtgatgagacatgacttggtgtatattcttaacagaaaacaatcatgttgggttttgattactcatggcactaaggagaaaggaacttggttggaggccccatgagagaaatcatgcattgaatccaggaacagaatgatagaaactggcttcagtgcaactactcagcagcagcatcctcttgggaggctgggggtctgtcctcgaagcaggtactgggactaaagaaacagaaaatgcttgttccaaggtacattagtcttttaggcaaggtcagcaaccctgtggaggtaaaaaacagtaatcccaggttgctggcccccttcctttaagtcccaggagagaaaaataacggtgagaggctgaatctcaggctgataaagaatagagttgatctgagcttcctttagcaatggagccatgcaatgctctttccccactcaccccagggctgaggttgaaacaggggttcaggcctgagactctcttcctagaggagcctcagtgtcacaatgtacagaaaggacttatgtcctcctgtaactcccccaacaaggaaatcaaagcaggaatattgcctgtttatgcagatccttgttgaactgaaatgaaaggaagaaagagaatgtattcagctactgaaaccacctcagacaattagagaaacgtttccatcatacttccattgtccatcactcaatggacgctctgcaggagcctgagtaactgggacctcatgcatctggctgcattaagatgccaggctgggattcctctctccttagaagctgtctttgtttcctgactatgtgatttcagcaagctctctggcattgcttttttgtctcagcccctcatcatggaagaagggtgagcaagtcaggagaaaggtgggtatcggtcacctcacaggatttctcacctttcttcctccttctgtgcgtgaagatgtccactccacagatgatgagccccagcatgaagcccctggctcctgtcagcatcttgctctgcacagaatcagactgtgcctctaggaagaacaggctcaggttcagagtcacctccagcagctgcacccctgctcatgtcctgtctgagatcctgcagcctgatgcagaatattggcacgaggagagcgaggggaatacaccttgcatgacaggaaactgagaaacagtcactctctcaattctagaacagagggtgtgacctcaacaacagacaaattcagattcaattagttgcctctcaaaataacttagaataagctaaaaggctgaaggaagacaacagttcccatgtgtaacgtcagttcaggaaggtgtctgcatccctagattcttggacaaggagaggaactatgaatccttaggacctcctaggccgggggcaggcaagtctccattgtccccaggttaaaactacactcagtgtcttctatagaagaaaaatggggtcggacatggtcccagggtatagacacataaaaccagatgagtggaccccagagccagagagtcccctgctcttcagaggtggagtctagagggtcatcagaccctcactccactccacggtgacaggactgtccaggctggggtgctccacttggcaggtgtagatgtttccctgctggggggtcatttccagcatctccaggatctggaaggtccagtctccattacggatcaggttggtggacacgaccccagctgtttcctcctgtccattcaggaagcatcggacttgaatgctgtctgggtagaaatctgtcacgtggtagacaagcaggtcgtggtgctgctggggctccttcttggaggggagatgttcaccctaggctggactaggagtggcgaagtggaaaagtggaatagcatttgagattattatttcttagacatgctcattatggaattgatttctagatgttgaaaataggaatgatggccaggcgcagtggcttacacctgtaatcccagcactttgggaggctgaggcaggtggttcgagaccagcctgactaacatggagaaaccctgtctctactaaaaatacaaaattagctgggtgtggtggtgcatgcctgtaatcccagctactcaggaggctgaggcaggagaatcgcttgaaccccggaggcagaggttgcatgagctaagatcccaccattgcactccagcctggacaacaagagtgaaactccatctcaaaaaaaaaaaaaaaaaaaaaaaaaaaagtaggaatgatgtgattaggtcagcagataaggggagtattgaaactatagaaatagtattgagaagaataggaggcacacaaacttaccagtttgtagcacatttaaaagaaatcttatctatcagccactgattaacagcctttggacaaagaatatttaatcagcagcgacactaccttatcttttgagtgctctatcctgatgcaaaagatgaaaaatttgctcaaatgatttcttgaaattaatatatatataaacaacattctcatggtctattaatccaataactatatttcataaatatatcaagaaaataaagtgagcttgacgtgacttattctgcaagtaacctatggattttttggcctcgcctacaaacactcaaaatcgtcctatttacataatatcctgagcccctacatgcttaaatagtagaaatcccatccttttccctaagttcctcctctgcactgtgttgtcacatccattgaggttctcagataaccaggtgttggctgtgccttggcacctctctatttttgccccctctttttctgccgcttacagatcaatttccacgctaccacctgcagcttttcctttggacctcagccactagtacccttttcctccacagaaggcagaaaagggccaactgcccctagagaacagctcaattacaggaatgttccaaatcagagcttctaggtccttatttactctgttcttgagaacacaaatacactgacatgggcctgggccaggtaaatgaacagtctttaactaacccccaacccttactccctatggcatttttgccttgtgtccaggattattcacattcacagcctcttccctcgatgtgattttatttcagaggcacttggctctcgttctacttcaaccacctccataaactcaacatccatcagactggtcagcccatgtctgaatcccaactgtagattaagtggaacttcttccccataggtgtcctgggaagcatgaaagtcatgggatatatggttgtctgttttaaggtcccagaacattccatgagaagcactttgctccatcttctttgacgggagctggtcagcctggagcacatcagagacctccagggggcgctgcagctaaggcttgatacccagtggcctcatttctgacccagttcaaatatatttcaccaaggcaaggattcctgtttgttctagttgcctttgctcagttaattctagatttgggtgggcatccacactggaatggccagaacttctatcctcctctttcctccgtctcccctacccctgtgtttttctttattctaattcatgcccttattatgatttccctggacaataatagcagtttcttatctcatctccctgcctctggttcctgctctctccaactgacttcacagtcttctgaaaacagatttccagccttgtcattttttttttttttttttttttttttttttgagacggagtctcgctctgtcgcccaggccggactgcggactgcagtggcgcaatctcggctcactgcaagctccgcctcccgggctcacgccattctcctgcctcagcctcccgagtagctgggactacaggcgcccgccaccgcgcccggctaattttttgtatttttagtagagacggggtttcaccttgttagccaggatggtctcgatctcctgacctcatgatccacccgcctcggcctcccaaagtgctgggattacaggcgtgagccaccgcgcccggcctccagccttgtcattttaagatttctgaagattttcaaaaatcttcagtgttctgacacttatctggttacatgggaatcacttgggagctgattaaaaacacagatctccagacctccccacctagggaatctgaatctctaggcagtgagtctgggggaatctttgcttcacagaggatctcaaggagagtcttctgagcagtgaggttggggacctgctggcctagaggagaaatccacactccttagtctggcatcagggggtctctgcaatctggcagctgattaccatgaaagaaaatgctgccatgtcgctgatttgggcctctatgaagtcttagtgacagattttgcaaattgtattacttttatttggacacctctctcaaccaattacgccagcaactttcctaaacccatgtcactctcctcatccttactcaatgtgtgcatcttctccctcttatcagatgaccttcctttcactttcccaggaacagagggatcaatggtgtgacctcctgagcctcctcctcctcccccttcattctttcctctttctctaggacaaaggtccttgtttagtgagaggctcactggtgctttttggtctccttcacgggatttctctcttggccaaattaatacacgagttattaagagattatttttaggcagctaaaaagggtaaaagttctgggtggaattttcctttaataaaaagcagccccaagccattttttctctaacagaaagcagcctgaaaactcaggcatagatatgcaaactagaagcttttatgtaaatgctggcagctgttcctggaagtcaggtaattcaatatggctattctcaccctctttcccttctacgtttacaggtgtcaaggcagcctccaggttaaagcacgtgtacaggtatcatggccgccaccaggtggaggccgcatttgtataataaaatactagggtgggaaggccagtctttttgcaggttatgtaaatgacacacctggtcaaaccaatcccctgagccctatgtaaatcaatcactgcctcctcaagcctctgtacaaaaccaattgctttccaccagaaacaggagaccctctcttgggtgacctgccttatcagcattaggaagcttttcctctcactcctcttttctattaaactttccgctcctaaacccactccttgtgtgtgtccgtgctgtgaattcttttcggctatggtaaagaaccagggtatataccctagacagtggagctgtttcattttgggagctcatccgggatccaaatcagaatggaagatagaaacatcggagtggtgagtatagagcaaacgtcaaatctgttctttaatctcaagaatctcttcataccagtttcctttcatggagaacttcaccatcgcatgaggctgggaaagtcttggggcaactgaaaatttctggccagggcacaccctggtgttattcaaaggcttctggactgaacgcagcctccgacagcctgtccaggtgttggtaatggatctccagctaacccgttgcaaaattttcctttcctttgtatccgtggtcactatgtctcctgtcctctctctctgtgtgtgcaatttgcgggaagttttacagttcagggaaacactcctgttagggaagatcggcaaatgccacaggcagtaactgttactctctatcctctctggcgagcacatggtagtgctaagccaacagcaccacctagtggaaataaaaatcctcttcatcaggcaccttgtcggttttttaccgtaacactgccgcttccaaattctttcgtgccgctagaaaagcctcttctgtgaacgagaaagcactgtcttcaacagtttggagtaaaatgtcctctgtagtgaaattttagttctgatactgtctcatcagcaggaaaaacagccattaggttcctacgttcatttccgtctccaattaggatagtacttaattagcaaggggattttaggttcggaagttaaccagagccattttgctaagggtaaatgtcttagcatgggccgtaatggcaggcaatctagcacactgcctccgttaaaggagcctacccaaagatgacatagtctctctggagatccatttttctgggagccaggcagatcacacaaatttaggacgtcaaaggggatcacataaggtggataagctaaggttgtgtgggtaaagtatggttaatcccatcacttagtttatccagttccacggcttggaggaccacgcctacaaccatgggtggtacatttaacacgttgccaggacccaggaaccaaggagagaaaacagtagggaggacacttccactgtcttctcctccaccctgggtcacaatgaaagaatggggacgaaaggatacttttattctcacttctttttctagatgggtgacagaccagcttcagcttgcacccctctggagtgcactctgaaacactggaactcctttaacctcaggactttgaagagaaaagtgactcattttcttttgcacaagggcatggcttttttactaaacctttgcaagcactgtaagatcagcccagctttttaaataggcatatcaggtaggcctatagaaaataatcccccagaattagaaaggcaatttccaagggaaccatctgagaattccccttatttagggttgccaatatgggggaagtaaagagaaatcagactgttgctgtgtctatgtagaaaaaggaagacataagaaactccattttgatctgtactaaggaaaattcttctgccttgacatgctgttaatctgtaaccctagccccaaccctgtgctcgcagaaaacctgtgctgtattgactcaaggtttaatggatttagggctgtgcagggtgtgctttgttaaaaatgtgtttgtaggcagtatgcttggtgaaagtcattgccattctccagtctcgagtacccagggacacaatgcactgtggaaggccgcagggacctctgcccaagaaagcctgggtattgtccaagggttccccccactgagagagacagcctgagacatggccttgtgggaagggacctgacctgaccgtccccaaggctgattcccataaagggtctgtgctgaggaggattagtgaaagaggaaggcctctttgcagttgagataagaggaaggcatctgtctcctgctcatccctgggaatggaatgtctcggtgtaaaacccgatcatacattctatttactgagataggagaaagccgccttatggctggaggtgagacatgctggtggtaatactgctgtttactgcactgagatgtttgtgtaaagtcaaacataaatctggcctatgtgcacatccaggcacagcacctttccttaaacttatttatgacacagagtcctttgctcacatgttttcctgctgaccctctccccaccattaccctatagtcctgccacatccccctcactgagatgatagagatagtgatcaataaatactgagggaactcagagaccagagccggcacaggtcctctgtatgctgagcactggtcccttgggcccactgttctttctctatactttgtctctgtgtcttatttcttttctcagtctctcgtcccacctgatgagaaatacccacaggtgtggaggggctggcccccttcaacctcaagctcccttttcattacaggaccttaggcaaacaaaggaagacttatgctaattttctgataaccccaataggtatatagaagctgtccagaatttaactcaggtgtttcacctcacatggaaggatgttatgctgctcctaaaccaaactctaaccgcagttgaaaagcaggcagctctgcaggcagcagataattttggagatgagcaacatatctcctataatacaccaaaagggaagaaaagagatagggaaagtgaaaaaaataacagaaacaccattcccagtaggaagggaagcagttcctctcgacaaccccaactgggaccccagtagctctgcaaatgaatagaaatggaagcatttttaaaatatgcatattagagggtctatgaagaactaaggcctgacctcttaattcctctcaactgtctatgatagaccaaaagccagatgggaatcctgcagcttttatggaaaggctgagagaggcactaatagagcacacttccttagcccctaattcagtcaagggatggctcattgtaaagacaagtttattacacaggcagctcttgatattagaaggaaactgtagaagcacgctataggaccagatagcaccttggggaacctcctgagggtggccacttataatagggaccaggaggaggccccccagaaagagagaaagctcaggagaaagacagaggctctagtagcagctttgcaagcttgcaaagtccaagatttctgaggtgcatccgctagttgctatcagtgtggcaagccagggcattttaaaaaggagtgcccaaacagcaagaggaagccacctcaaccctatccagcctgtggtggagaccactggaaatcaaactgcccccggagacggaggtcactggagtcagaaccagtctcacagatggtccagcaggactgatgggtcctggggctcaaaccccagctccagtggctcaaactgccattacagcacgggagccaccaggtgattctggaaattgaaggaaggaaactagacctccttctaaacactcgagccagtctctctctcttttctcctctttaatccaggcctctcttcttcccatagcgtgagtgtaaggggtgtctcaggaaaaactctattccaatatttttctcaacctcctaattgcagttaggaggacctattgtttacacatgcttccaagccattgccacggtggctctactagtcaaaaaagcctccaaattaaccctaggaaataatttaactgtttacaccccacataatgtagcaggattactgtcctctaggggagactttagctaacaaacagcaggtaaagcaagaaatacataaggcaggacaagcaatagtcactctaatgtctctccccagacacaagcactcaattagctgaactaatagttcttgcaagtgcacttaaattaagcaggggaaagatagctaacatttccactgactccaagtatgctttcttagttctccatgctcatgctgctatttaaaaggaaagacattcttttaccactaaagcatctcctataaaatatcaccaggaaattaacaggttattatcctcagttttcctttcacgaaaaatagcagtaatgtattatagggaacatcaaagaggaacagatgaagtagccaaaggaaataggttagctgagcagggagctaagcaggcggcagggaagcctcaaggcattaacacacttcaagcccttttaatctcggaagcctccataaaagaaattaaacctcagtattcccctgcagaaataaaataagccacttcttaagggtattccagccctgaggatgacaaactccatttactggcctccagtcaatggaaagtccttaaaatccttcaccaagctttttcacataggaaaggataaaacttatcatcagtgtgctcagagattgttttcaggcagaaaacctctaagttgtttaaaaatgtaacctctctagctcacttccaacagaaattgacacaactagccaaaggccaaccccaggaaattggaccaccagaaaatttggtattggtgaaaactcatctctctctccttccctaagccaggctgggaagggccctacacaattcttctttcaacccccccagcagtaaaagttacaagtatcaacctctgaatatatcacactcaagtcaaagcctgaaaagctgagggagcaacctttgacagcccagaggaacatcctgaatatcaatgtggagatatagaagatcttaagctgaaaatcataaaaggtaagtaaatgagtgagggctactcgccttagcgccaatcctacctcaccaggtactctttatcatttctacctttcctctcaaaattcactgctcagtattagaacttttttttaatgcatatttgcagagagattttaattatacatgggactgcatttgttactttgtaaatccccaaagggaaacattatatcttggcaagtaaagttttaaatggaaattatttactacgtcacttttgtgggaattgttatcatcatgctgttatttgcaatagaactgtatactgtggcacccacaatgtggaattctggttgtaaaattctaattcctgtaatattttgcctaattatcatctttatgacagaattaataattgcaggaaggatttggtcaagtttgttttgcttatagcaggagtaatagttacagacaagaagtaagcatgaaaattttactatcactaagtttgataggacttttttattgaagattggtaaatggtgcactctaagctatggaaagaaggttacaaataaagggattttatataagaaaggatcttgtatagtaaattcttgtcctaaaaggaaatgactggttgtttaagacaagtcagaaagttgagtacattgtaagagggtctgtgaaagtcatgaaagaatttaataattaagaaatttaataattaaaggaaaggaattgccaagattaacaccaaagttattttagccacccaataacgtttttctcccaatcatatcataagttataaagaatggcctaaaccaaaaattatgccctaatagcaagtcaagggggaaacatgttttctcaaaggaaatgatgcttttatattaacgtttctggtaatgtacagcgacatctagtggagacaaaccagtattacaatccattggtgtaacaggtatcaaactctactgccatagttacagtctataggtggtaatcttaatactcatatggtaaccctatattttaaaccttcttgtaaaatttatctctttttgcctagaagcaatcaaacttcaaatggtgctgcaaacaaagccacacatggacatgccattcttccaagaagccttagatcaacctcaggaggagccccaactgcagccccccgacacgacgccccttttcagcaggaagtagccagaaagaatcgtcgtccaacaccccctaacagcagttatggttacgtctcctgagggaggaaataatacaggagttattaagaaattatttttaggcagctagaaagggtaaaaattctcagtggaattttcctttaataaaaagcagccccaaaccatttcttctctaacaggaagcagcctgaaaactcaggcatagatatgcaaactagaagcttttatatgtaaatgctggcagctgtacctggaagtcaggtacatccaatatggcggttcccactctcttttccttgtcaccacgtttacaggtgtcatggcagcctccaggtaaaaccacatgtacaggtatcctgtccaccaccagttggagaccgtatttgaataataaaagactagggtgggagagtcagtcttttcgtgggctatgtaaatgacacaactggtcaaaccaattccctgagcgctgtgtaaatcaatcaccgcctcctcaacctctgtacaaaaccgactgcattccaccacaaaccgcagaccctcttttgggcaacccactttctcagcatgaggaaggattttttctctcttttcttttctattaaactttccactcccaaacccactcctcacgtgtgtctgtgtcgtgaattttctcggccatgacaaagaaccagggtatataccccagacaatggagccgttacaaaatcacaatgtccagttcccaggatccagtcctatgctcctcccgatgggtcccctctccctgggtggtctcatgtaggccaggcccctcccccgctgcaaactcttctctcacctgcccatcagaccacccatctggcccctcaagcacctcaaacccggccatctccctgcaggtttcttctctgcgtggcctgctgtgccatctccaccttcatctccacaccgcacccctgcacgatgtcctgtggcctcgtttcccctcaccccacatgcagtcagctgccaggcctgatgaagtcccaggggtctctctccctccatcctcctcactccatgctcagcccaatctccgtgctcaccctcctgacaagctccggttgggctcctcccatcaatccccagctcaaagtccccttccctcctggcactaaggtcccttaggccggcccggctgcccctactccctgggcccggcccccacggctgccccaggagccctggttcacagccctcacctcggcgctgccggatgagtggctccatcagctcgtacttgtgtctgcacaccttgtccacctcggctcgcttccgttccataaagtccttctggctattgaagtactcgcctatgggccgccccagctccatcactgctaggaactcccccactgcgctgtcaaaatgcacgtattcctcccggttgtagatgagcccgtccacaacgcgctgagtcccattgaacgcatagcattcctgccgttcctggtagacggaattctctgtgaagagcagggagagatgggggtggtgccactcccaacaacacccccctcctcaatattagctatttcctcaaatcttcccactcaggactggatttaaaaatacgatttttcctactaccgagttctgtggtcctaggcaggtcacagactccaggcatcagttttctcaccacgcagcgagaggatttactgaaaagaatgagactcactgctcagggtggctgagtgatcattagggaggggcgcacgctgaagggaaagcagccctttctgctggcggctggaggaggagggggagacatttcacgtctcagggaggagcagaatctcatcagggggagggtccctcaggcagagaaacagtagggataggaggagttggggacctggagggcagagctgctccccctacccaactccctgcctgacatttccatcctgatgtcagtcctggctcaaatgccacctcctccaggaagccctccattccttctttccctttctacagctaggttctctctcttctctgccagtttcttgagaatacctcaagttgctcttgctgttctgcatgctggacatctctgcatgctggaaatgcagaaatgcatttccatgcattcctccctccctccctcccttccttccttccttctttcttctttcaatggagtatccttccctccctcccttccttccttcctttcttcctttctttctacagagtatcactctgtcgcccaggctggagtccagtggtgcaatctcagctcactgcaacctccgcctccagggttcaagcagttttcctgcctcagcctcctgagtagctgggattacaggtgtgcgccaccacgcccagataatttttgtatgtttagtagagatggggtttcaccatgttggccaggctggtctcgaactcctgacctcgagatctgccctcctcggccacccaaagtgctgagattacaggcgtgagccaccgcacttggccagaaatgcatttcttaaaacttcttgaagtttgccataagaaagactatatagcctgaaagttaattttcactttcaaacatggctgtagaaagacttgatctcaaaacacctggaaaatatcttaatcaatgaaaatcaccagaacaaccagaaagctaagtgactggactcctttaggtttagaggcattgatggtgtcatttttacataaagaaatgtggcagccttttccacctgcagttcttcctagggagcaccatgggcagtgtccggcaggtgcatgtgtatacagaagtagcaatgacccagcacatgtctgagcctcttcagacctgatctgttcctggtcacagtggggaaattaaggtgctgtgatttgcacacagcaaattaaggtttgttttggacacctgtttcatgttctacaaattagcaactcacgtttattaacctcacccctcatagaagatgcacagctggtggcagaggacagtagagaaggggtggggctgggcacagcggcaccgtagactcggcctgtagtttccagtgtcatctctaaggcaagatcccaggactttagatatcttaacccgcctcttctcctagtgccttgggctccagccccctaaacacccaggcccatcgcccccagcccctttagtctgcccctccctattcaagtgccccactctgagtgtgtatcctctcattttaatttgttagtctttgttcctcttcctcattcaccaataagagaacatgttttagtcaagagtaagaatttcaaaactttcttttgcaacatttaactttttaaagggaattttacctgcaaagcagatataagtgatgagtatatggtggaatttgaaacttcattttttttttgtatatggaaaactttatcctgtttgcggaatctttgacaattgagttacccagagcacaatttgaaaaccaatgatctgagtgaattcatctctcactcagaataggttatattaaaatataattgcagaaagatataatggagtccatatgggtaagaaaaggaacatgtcacaggtagggattccagttcttgcactacgactgattactaagttatcttggacaagaaacaaccttctaactctccatttcttgaaaggcaaaatagtaataatactatttaccttgcaaaactgctgtgagaaccaaatgagctcacatatgtcaaatacatagtattgtatctgttactgctcaatctatcttagttcccttcctcttttcactgtgtgacctgtttgaataggagcaaaattctaaataaatgcatatgaaagaggaactggatcagcttatgagctactggaaaacctcaagaagactttccatgggcaccagatcttaatggttgaaaagtgtttgttggctgtttgctgactggatcttcccccctctcttttgtgctagggattttatttgaggagttagattaacagaagagtgagtacccaaagactcaaatgcacaatgagcttctgcaagtgcccagctggtgtgacaggaggactcgggagtgtggccctaatgcttggggtagtgggtggggtgaggtaagaaactcagctgtaaaaagcccattttaaagcttgtcagagacaaaagggtgttgcctccaggagtctggttttttcacctgccgtgtcatctcctgctccctaggtgttgtctcagccaagcttttctccaccctcccctctctcactttaagccacagcctggctccttgtgcctttcctcttgtgctctgaggatggagatgtgtgtggagttggaagagcatgcagggaattgtggaattggccctgcccactctacccactcccctatggctccagctctccctccagcaggttttgattggacattcattctacacggggagctctggtaacccaccctcggttcctgtcacatggctccactgcctcatctcatttcccctaccaacctcaacccagtctttgcccgtccacctgttcactgcccaccatcatcacgctccctcctgtgctttctgctaccccgcaccttgagggtttccatggcgtttcccaacaccacccctcatcctacaaacaactctgcctatggacactgttgctatggacctcctgctggacactgttcagtgtcaccagcgctgctccagcctcctctctccccaacctcacccctctccagttcccagggctgagccattctgctggttagttctcagcacccctgtgactacaagtgcagtttgtccaccctttcccggacaatgaacctgaggtaataggtgaggggctttggggtttgaggggctgtcctcaggagattcgaatactgttaccctggaaaatgaggaggtgacatgagaacagcactttctaggggtgtcctaggtggatgtggaagggtctcagagggagggtctatgcagaaaggtggaagtcagtggaaaactaagacacctactctgcagtccttcctctcagggtgttggtgtaaatttggaccagaaaagtaagaacatcctgagagaaaaacaatgggtcatagaagccataatattacaccagccacaaggagacagcaggagacagaggtttttcccttggttactgctttcttggctgtctgataacctacactcaatctctttcacgtactcacacatccttatctcattcttctgacaggtttcaacccatcctaatactctaaccaagttctggggaggctgggagaaataccttcaacaagagtgcctttaggggctcgaacctgtccccctccctcccatcttgccttcattgtccagggagcattggctcctgctccaccctggagaatgagaggcattctctgtgagcactgaatcctcagtgatacttgtagtctggacacaccagctaagggctctctgcctgagtcccctcaaggttggatgcagatgtgagcacacccaggagtctgcacttgccaacctctctctctgaaaccttgtctgtccaaggttatcctgaacctcttggccccatttccccatagacaagcaacttgacccctgagcacctccccttatttactgtgtccatgttcctggagagagaatagacctggtggatagcaacctatcctataggaggtgagtttgattctccagctgtgatagaaggacactaggccgtggcaggagccccacatgctgtctcagagtctggttccataaagagaaagtcccctaggaattgttccctgagccagaccctccaggaatagcagctctgctcttacctggagtggccctgctctggaccacagatatgagcagcaccatcagtaatgctgtcagagccactgtccaggggccccctgaaacctgcaggatcatcatggagttggaaaaggttggcagaatgaagagagctgcagtcaggaaaacaagaactcattaaagggagctcctgtctgaaatattagagaccatgaacccaagcagtcttctgtgaccctaggattggacagactctgagaaaagaaccaatgggcactgagctttgtatgagtcattgctcactgggcagaaagttagtattaaagatctgacaatatagagccagtgatgctgttacgaggacagatggagaacactgacactcattttaaccagtcagagtcatgagttttggggagatgatgtgttttctttgctctgaaggtgatctcagatattctgctggcccacctacagggattatcatttccccaattctgccacacctcacacacccacaggacatggcctggtgtggaagaaatgctatctcaatgtgtaaaaggtcattcagtggcatgatttagagagattagagtatccatcccagaactgaaaatgaggcctggagtctgttttgcctttgttcaaggccgtgcttcagattagtgcacattcatattttcttcctcccacatgtctgtgagtcctgagatgtgcgggggatactggctccttccataggactgtcatcagggtcagcagggctcagtctaggggccttacacctgggagcatggacacaccacctacactaccatggaagtatgcagcttgaaggacactgcctgtcttggacttcagttctttgtcttcagtatggggatgatatgacctgcctttacagcagggctcttaaggtcaaattagatcaacggatctgtaattgctttggaaaaatgagactaaaaattatacagtgaatgaggaagaaatgaaaaaatgtcataaaagaccctacattttccaaaacatctgattctgtggtgtttatactgaatagtttcataaactttcaaagaatattactccttaatttaaagacctataaatgtgatcctgtacgacctcctaatctaataaagaaaatgtaaaagtggcatcatttgtttatataaatgttaaaatgtaaatagaagactagcatgtaaaattcaagagaagaaaataattatgcagtagaaggggccagtataggattgcggggaaaaagctcacgttccctgccatagtcaccaagacagcatggtactggtataaaaataggcacatagacaaagggaacagaatagagaacccagggataaacccaaatacttacagccaactgatcttcgacaaagcgaacaaaaacatatggtggggaaagacacccttttcaacaaatggtgctgggataattggctatccacatgtaggagaatgaaaccgggtcctcatctctcaccttatacaaaaatcaactcaagatggattaaggacttaaacctgagacctgagactataaaagctctagaagatcacattggaaaaacccttctagacattggcttaggcagggatttcatggccaagaacccaaaagcaaattcaataaaaacaaagataaatagttgagacttaattaaactaaagagcttttgcacggcaaaaggaaccatcagcagaataaacagacaacccacagagtagtcacaatctatacatctgacaaaggactaatatccagaatctacaatgaacacaggcaaatcagtaagaaaaaacaaacaaccccatcaaaaagtgggctaaggacatgcatagacaattctcaaaagaagatatacaaatggccaagaaacataagaaaatgctcaacatcactaatgatcagggaaatgcaaatcaaaaccacaatgtgataccaccttactcctgcaagaatggccatgataaaaaaataaaaaaacagtagatattggtgtggatgtggtgatcagggaactcttctaccctgctggtgggaatgtaaactagtacagccactgtggaaaacagtgaggagattccttaaagaactaaaagtggaactataatttgatc

SEQ ID NO: 462 - DNA, 110608 bp, Homo sapiens
gatcatcagagtgacagaatgagaagccaccatctggccaccatcacgatcatcatcacaatcacgacgagtcaccaagagactaaaactactgagtaaaagcttagaaacggctgggcgcgctggctcacacctgccatcccagcactttgggaggctgaggtgggcggatcacaaggtcaggacatcgagatcgtcctggccaacacagtcaaaccccatttctaccacaaaaaattagccaggcatgatggcgcgtgcctgtaatcccagctactcaggaggctgagccaggagaatcgcttgaacccaggaggcggaggctgcagtgagcggagatcgcgccattgcactcctgcctgggcggcagagtgaaactctgtcccagaaaaaaataaagcttagaaagaggctatgtagtctcgagataaatccagccctatgaggcacatgtcaatcacagagggaaagctatgcacgcacaaagcatgtgtgaatcagagagaaagctatgcacgcacgatgagtagaagacaaacacgtcctgcaaggagacggaggcgcagggaaggggcggcagccgtcctcccaagacatgaggacttctagttcagtctgagaccttggtgcagggctgggcgagtaaacaaatgcaaaagaataaggacctcgaggtcgggcgcggtggctcaagcctgtaatcccagcactttgggaggccgaggtgggcgcatcacgaggtcaggagattgagaccatcctggctaacacagtgaaaccccgtctctaccaaaaatacaaaaaacttagctggacgtggtggtgggtgccagtagtcccaactacacaggaggctgaggcacgaggatcacttgaacctgggagacggaggctttagtgagctgagattgcaccactacactccaacctggctgacagagcgagactgtctcaaaaaaaaacaaacaaacaggtctggtgtacccagaatggaggcaccacgagttgctgaagaaggaaactttattcagtctatgataccaggacagttgtccatgctgccaggcaaaaagaaaaactggattctgatctcattatcagtacacaaacagcgacaattagtaacactgacacagccctgactgtgctgctggagggtccgaagcactctctgcacagcggtgaatccccacaatagccctctagggaaggtgctgttatcacccacgcgagacacacgaaggaaaggcacggctttgcagcagcagggtcacgattcgaacccaggtggcctgctcttatgataaacttaaatgtgtaaaactttatgctcaggaaaatataagagaatgtcttcctgaccctttttggggtaggacaataatttctctaaccaaaccccaaaagcatgacccattaaaaaaagggtcaggtggactaacttggctaaatgaagaattctgtttcaccaaagtacaccacaaagtgggccgggcgcagtggctcatgcctgtaatcctagcactttgggaggccaaggtgggcggatcacttgaggtcgggagctcgagaccagcctgaccaacatggtgaaaccctgtttctactaaaaatacaaaaattaaccaggtgtggtggtatgcacctgtaatcccagctactcgggagggtgaggcaggagaattgcttgaacccaggacggggaggttgcagtgagcccagactgcgccgctgcactccagcctgggcaacagggtgagaccctgtctcaaaaaaaaaaaaaaaaggccagacttggctcacgcctgtaatcccagcactttgggaggctgaggtgggtggatcacctgaggttgggagttccagatcagtctgaccaacatggagaaaccccatctctactaaaaatacaaagttggccggcatggtggcacatgcctttaaccccagctgctcaggaggctgaggcaggagaatcacttgaacacgggaggcagaggttgtgatgagccaagatcgcgccattgcacaacagcctgggcaataagaacaaaactctgtctcaaaaaaaaaaaaaagaaacaaaaaaaaatatatatatatatatacataccataaagtgaaatcaacagccacaacctgggaaaaaatacttgcaacatggcaaaggattaatatccagaaagtataaagaattcctacaaaccaagtagaaaaacaggcaaaaaaaaaaaaatgttggcggggcatggtggctcatgcttgtaatcccagcactttgggaggccaaggcgggcagatcacctgaggtcaggagttcgagaccagcctggccaacatgatgaaactccgtctctaccaaaaatacaaaaattagccaggcgtggtggcaggcgcctgtaatcccagccacgcaggaggctgaggcagcagaatcacttgaacctgggaggcggaggttgcagtgagctgagactgcgcctgctccagcctgggtgacacagcaagactccgtctcaaaaagtaaagaaaaaaaaaaaacaaaacaacatatttcacagagaagaatttatgtttttggagaaggagtttcgctcctgtcgcccaggctggagtgcagtggtgagatatcagctcactgcaacctcaacctcccaggttcaagcgattcacagaggacaatttctaaaaggcaaataagaagcaggaagggtgcatgctccttctctactgccctgtaacagtcattccacacttaccacctcaaaacaacaaatgcttttgatgttggctcctgtggggcagcaatctgcgggaagcttagccaggcacctctggcttaaggtccctcctgaagctgcagtcacaccatggaccagggctgtgacctcatccgaaggctcaactggggctgaggcccacctctgagctcactcaggtggacgctggctgggttcagttccttgctggctataggtggaaagggcccccaccagtttcttgccagcttctccacaggacgccccacagcctgacaggagctttcatccagcaagctcatcagggagtgggagagagcagccaggacaggagcccagacctttctgaacctcatctcagaagtgacatccttcccttctgctgtctgggcacagctccccgggtggagcccgaggactagaaggaaaagaaaacttggatttaaaatgggataaagccataggagctgctcgtcccaccacaggaatctcaacgccgggttactgacaaagcgtcactttgcacctcgtccaactgtgcagacctctcctagccaggcccctgcaccagaggttaagaatccgtgcccctggtcaggaagtccaggtgggttcaaacggccagcagggaatttcaggcaaaatgtgtcccaaatcttcaaaccatgccccagaactcagacctccccctgggagttcgtcccaaggaaaccacctgcaagaggctcaggctgcaggggacactccgcttccaaaacccggaagctggagaccacacaagtgcccaacgccaaaggcaccccgtggagggacgccctgtgccctcccccgaccaggtgacccgctgcgccctacacatcttcaccaggaaacatctgttatcgatgtggacgaagcgcagcctgcactcccagatccgctcattttcgttctgccctccgttttacgattcgcctacactgaaaatgcgtgagtggagtggaaagccttcctactcctgcctcagcgaccccttctaaaatactgcctcgtttggcctgaaaatgtgatttgcaggcttcctgagcaaagtagatttcactccattaaagaaaaaaaaaaagaaaaggcaccgaacggggctcggctgtcgggagttttgctttagttttttgcgtgttttgttttgtgtttttttgttgttgttgttctttttgcggccacgcacaccgcgttcccaggcttcagggcgtgggggtcgccgtggactcccggacgtgaaaacgcttaaagccagctgggaaaaccccaccagcgttttccgcgcacagcgccagccataggaaaggacccccaggagcgaatccgggcagggaaaccccggacgcccgcacactcagcatcagtaccggcacccagcacccagcaccgagcaccgagcacgcagcacccagcaccgatcaccgagcagagcaccccgcacgcagaacccaccgagagcctgatgcagtctccgccgcaggcatagcgctaggccccggcgccttcacaacaaagggacgctggcgggcggggcctgagaggcgcgcggtggaggggccgggcgcgaggccgcggagacagctcggagctcggcactggggagtggcacagcgctggcggatccaggtgggcttcacggggcgcccgcgggaccggaaatgacgcgcagaaccctgcatcgggctcctcgctgccccgcgggcgccgctcctcagtgccccagagccacggagccggggaaacgcgccgcggcccacaacgcccccgcggctgcccgttggttccgcccgggccgttctactccaggcagacgggaggagaaacacggcgcgctcagcgtcccctcccccgttggttctgctcgggcccttccactgcaggccgacgggggtggaaacacgcagttttttttttttttttaaggtctagggtaacacggggcttttaagtgcctctccgctgccgcctggtggtccagcccgggccgttgcagtgcagccacacggggagggacacggcgcgccgagtgctccgggcggccgcacgttggttccgcccgggccgttccactgcaggcagagggagaggacgacggtgcgcgtagtgcatccccgtggcccgttggttccgccggggccgttccactgaaggcagaaggggggggaccgtggccccaccccccgcggcagcccgttggttccgcccgggcggttccgcccgggctgttccaccagcggcacttcagggcgggatcggccagtctgtggaggcagcggcctctaagccccggagggtttactgcccaggtttgggttccaggaataagaaatccactgaataggcttaacttagaagacacaaaggcgcctcctggcggaagtggccacgctccgcccagcctgagggaaagctgctctgacagctgggcccggagctgcggggggcggggccgccgcgcggggtgaggactcgcctcagggcgctgattggctggtggcgcgctccggggcggggccttcgtatccaggctggcgtcggggctgccgcgggacatccggagcagacacccgcgggcgcgcctgcggccccgaggacccccggctccggagcttcgtcgagcgttttcctagcgttactttcccaaataattttcaggaatgaagttacggctaaagggctctttagagattacttttgggccgggcccggtggctcacgcctgtaatctcaacactttgggaggccgaggccggcgcatcacgaggtcaggagcttgagaccagcctggtatggccaacgtggtaaaacgtcgtctctactaaaaatacaaaaattggccgggcgtggtggcgggcgcctgtaatcccagctactccggaggctgaggaaggaggatcacctgaacccgggaggcggaggttgcagtgagccgagatggcgccactgcactccagcctggcgacagagcgagactccctgtcaaaagaaaaaagaaaagattacttttggccgggcgaggtggctcacgtctgtaatcccagcattttgagaggctgaggcgggcggatcgcctgaggtcaggagttcgagaccagcctggccaacatagtgaacccccccccatctctactaaaaatacaaaaaaaaattacccgggtctcgtggcgcgtgcctgtggtccccgctactcgggaggttgaggcaggagaatcgcttgaaccttggagttgaaggttgcagtgaggcgagatagcgccgctgctctccgacctgggcgacagtgggagacttcatctcataaataaataaataaataaatattacttttacgttttgttaaacttccacttgtttttgtttccgttgcatgaaccttcgtaaagcttcaggaggctgatggcagcctccttccccaggcttccccgtggcgcccgcagccgggttgggccagaggctgggactgtttcctcccgtggggtctttggtggggatgtccccagaggagtggggcaggaggaggggcacggagcgcccccgggagccggtcagagcgcagcgatggtgtctgtggttccaaccactcgggaggctgaggtgggaggatggcttgagcctgggagcttgaggctgcagtgagctagaatcacagcaccacactccagcctgggcgacagagtgagacccttgtctcacaaaaaaaaaaaaaaaaaaaaaaaaaaaaaaaaaaaggctgggtgcgttggctcgcgcctgtaatcccagcactttgggtggccgaggcgggcggatcacgaggtcaggagatcgagaccatcctggctaacacgatgaaaccccgtctctacaaaaaatacgaaaaaaaattagccgggcatggtggcacgtgcctgtaatcccagctacttgggaggctgaggcaggagaatcacttgaactcaggaggcagagcttgcagtgagccaagattgggccactgcactccagcctggcgacagagtgagactccgtcaaaaaaaaaaaaaaaaaaaaaaggaagaaagaaaattataaaatgaagtgaaattaacgcagtggagtgccacctgcctgctgcctgagttcactatccacacggagttcataaatttgagagcagtttacaaagtagattctcctactttccaggaaacccagaaatgtctggtgatttgcccaacagtctcagctgttgtggtcagcagggccgctgtggtatccaaatgatttcaaaagcagatttataaaaagtactccttttttttttgagatggaatttcgctctcatcgcccaggttggagtgcagtggcacgatctcagctcactgcaacctccgcctcccgggttcaagtgattctcctgcctcagcctcctgagtagctgggattacagatgtgtgccctcacgcccagctaatttttatatttttagtagagacagggtttcaccatgttggccaagatgttctccatctcctgaccttgtgatctgcccgcttcagcctcccaaagtgctgggattacaggcgtgagctaccccacgcccggcctttatttttttttgagacggagtctcactctgtcgcccaggctggagtgcagtggcgcgatctcggctcactgcaagctccacctcccaggttcaagagattcttctgcctcagcctcccgaggagttgggatcacaggcacccgccaccatgcccagctaattgttttgtatttttagtagagacggggtttcaccgttgttagccaggatgctcttgaactcctgacctcatgatccacccaccttggcctcccaaagtgctgggattacaggtgtgagccaccacgcctggcctctcaaagtttttatagcaaagccttacatttcatgaggaaccatgcattttattttatttttgagatgggggatctcgctactttgcccaggctgggctcaaactcagggctctctggcctcagcctcccgagtagctgggtctgcaggtggctgtcaccgtgctgggcctggggtgtgcgtattaatgattttggaatagtgtctggaagcctgtgtgctttcctctcttcctctccccagaaggacctcccacctcgtcctcccaaagtgttgggattacaggtgtgagccaccatgtcccctctctttgctattttgcctgggaggagtgtattaataattttaattttaaagttctttgattatgttctagtttgattattgatcatttacttcttagctatttatattcttccttgagtcatcggtttctgccctttgacaatttttctgtgaatgttttgtgtcgattatatgagctttgtctgtattgagaacatccacgaattgtattattgcatctgttttgctagttgagaacatcgacctgctgtattattgcaaatgttttcctgcttgcatgtagtcatttgttgtgcatattaatgaatttctatccacatgacgccggaaggggatagagtgggtggggaggaagagggaagggtccccacctggagacccagcctgcaggccactcggccacctgcgcagaggtaggggagcagcagccgctcatgcccctgcaatttgtcctcatcagcaggtggggaaactgaggccggggagttctccaggccaaggtcactcacgggcaagttcccgcagcctttggaccctccatacatgtcagggccgctcatgctttcctgggcccttcactggtttggaggaaccatcctgtttcccagagcgcactgcctgtctctgagtgtatgtgtctcagtggcgtccatgtgtatttttctgtgtgtgtatctgtgtgagtctgtgtgtgtggtgtgtttgtgtctgagtgtgtggtgttagcgtgtgtctcagtggcgtccatgcatatttttctgtgtgatgtgtctgtgtgtgtgtctctgagtgtgtggtgcctgcgtgtgtctcagtggtgtccatgcatatttttctgtgtggtgtgtctgtttgtgtgtgtgtgaatctacgtgggtgtttgtccatctttttgtctggcctcctgtcccctctgcacagagcagctgggtggggatgctggtcctgggggcttgtcagcaggatgtgggcgtggggcagccctgggtgaggcctgagtacaggccccaggtgcctcctgcacaggggtggctgagccggctcctctgtggctcccgggtccccaccgccggtcactgggcaccacctgtcctggccacccactcctgcccaccctgctctccgcaggggcctccttcctctttcagctgtgcgccctggttgtggaggctcctaaggaggttgtggcctcggtttaccacctgccttggctccttggtgttgccagaccctgaaggcagcccatgccctggctgagatccttctggggcaggatgtgctggaagcagctgaaacatgtggtgatgtaccagctcctgctgtcccctacatccccagcaccgccagccttccctgggctcctccagctggcttctctaccctgtacctgccccaccctgctttcccccgaccctactaccccccaaccagacttccagctccaggcagggtcgcagcctcctgggctcccagcaggacaggcctcacccagaccccgcaggagccgtgggacttgggctgggtctttgggcctggctgcagcccctttggacctgacctgaggagacaccctggctgtgggaggcagggtgggggtgccgggcccagcacagaggtgcccagggtgcaggctggcactggcccggcagggaccgtggatgccgccgtttcaggctcgaaaaggtttccatgccccagagcctgagcccggcagcccccgaggatgtcttggggcctctgtgctccccaaagccaagaaggttaggcttgacccacagcctcttccaggccggggaggcagaggcgctccaggtcggtagggcggggcccacagcccagggtttcacgtccccaaaacggggcagggtgctggaggggcaggtgtccacagggtggtcgttttggtctctcctggacttgcacgcgtgtagtgcagactggctgccggcaaagccctgagccacattcatctgggccttgttaggacaacagggacggtgcggggtgggggggttgcggggcgcaggaccacgtcagtggagggagggaggccgatatcggtgcccaggctgggcccaggggccagcgggtcctcacctggcttgtggctgcccctgttaggcagcccggatggaggggctcttccagccctgctggccccgggaatgcagggactcaactccccctggtctcagtggctcttccgggagcaacacagcctgcccgagtcgacaccacccctcgggtttgagtcccttctgtctacccctacccccgccagggcactgcccccttgcccggaagaggcagcggcacccccagccccttggggaggatgccctgccggccccacactcggtggatgggcattttggggctaggatttaatgggggtgaccctgcccgacccctctatgttggttccacggcgtcagaagaaagctgttattaacccagcttattttctacaagtcttgtttattgaaaggatctgaaaagcgtaataaggctttcaatgacatttaatacattttcaagaaattaatatgaaacattaaaatttacttcaaaaatccaaagttttctagatcattcccatctcacgctgctttagaggtcagttcacaccttctgtgttcagatgagcggctggaattctgaacactgccgtcttccagccctaacgctgggcgctggtccctctctcctaagcccacggctgggcttcccctgtgcccagggtcatggcggacttcaagccaggccggctgcccagaatcacactcagggtttttggacgctcaagtccacagatgctgaggtgcccagacgagggtgagcagggagacacatgcctcggagaacgtgcccaggctgggccaggcggctgcgggaagctcctcacgggcagaggagaacgtcttgtgccttccttatcgatctccagcagatgagggcaactttgtgtgcaaaactcagagagcagttactcaaaaaaaagacacccgggcagcagtaaccaggacaccagggtccgaccacggcctccacacacctgtgcccgtggaagacgcgggcgccggggtaggcagcatccacgtgctccacagctgctggtgctgggcaggctggagactcacgggagaggcaggaggagaatcagcgtgttgagtccctcgctgtgttagtgtgaaaaattctcattacagttgcaaataaaagggatcacgatcactagccccggaaaccctcatctcccggaccatcaggatcgcactgaacagaatggtcccctaatggtccctgaggacagcgtcttgcagaacataaatgtaaacattgaatggcagacgactcccttccccttgaaatcttcacaaaagtgtgtacgagaaagtatgtacatcagcacttcagaaaaggggcccacaggacgtgtgcggggtgtgcagggtgtgcggggtgtgcggggtgtttgagggtccggatgtgcgtcccgaggtcggagggttggacgcccctgtgtccagttgttgggaggggtgggaggcctcgccctgctgttcagccccttcccctccactgggccgcgttcccagggacgtgcaacagggcgctcaggttaggagacccgaaaccacaggcagacaggacccgccacgcccgctcccagccctgggcacccccacccccgtttccttccagtccattttccgcggcagtttttggtcctggggaccgtcaccgatgcctcccacgcacgctttcttccctgaagggagacgtcgctgcgctgggcctctcggcggtcccccccacccgggtcccgggcccactggccccccgcagacgccgctacacgctgactccagccaggctgcgctgggaccacttcaacctcacctacaggtgcgccctggctgggccccgggggagggggcgcggccggcgcccgctgagctcactctccctgcaggatcctctccttcccgcggaacctgctgagcccgcgggagacgcggcgggccctagctgccgccttccgcatgtggagcgacgtgtcccccttcagcttccgcgaggtggcccccgagcagcccagcgacctccggataggtgggcgcccgcccccgccccggcccggccctgcgcgcccggcctctcagccccgtgctccccccaggcttctacccgatcaaccacacggactgcctggtctccgcgctgcaccactgcttcgacggccccacgggggagctggcccacgccttcttccccccgcacggcggcatccacttcgacgacagcgagtactgggtcctgggccccacgcgctacagctggaagaaaggtgaccgtccaggctggcctcctggaggcctctcctctgcagcacagtgggctgccgcggtcgggctttggggcagacggcaggagggaccttccggggtggtggctgccactggagtctagcaggcaaggaggggagcccgtgggagcccccatcccggcagccctgaactccctttcccatccccctgcgcctctggagcgggagctggagctgcattcctgggggccgagctcaccgcctgggcccagaacattcttatctttccgtggctgcggccgagggcggctccgcggctgcgctccagcagatacaccgggcctcggggagctggcccacgggcggcggggctgggcccggggctcccaggcgctgacccccggggcccgcaggcgtgtggctcacggacctggtgcacgtggcggcccacgagatcggccacgcgctgggcctgatgcactcacaacacggccgggcgctcatgcacctgaacgccacgctgcgcggctggaaggcgttgtcccaggacgagctgtgggggctgcaccggctctacggtgagtccctttgtcgggcgggagggcggggaccgggcggtcctgagccaggccgtgctccccacgctcccgacaggatgcctcgacaggctgttcgtgtgcgcgtcctgggcgcggaggggcttctgcgacgctcgccggcggctcatgaagaggctctgccccagcagctgcgacttctgctacggtgatgcccacggggccgggacagggctgcgtgggagctgggccttggccatggtcggggctgagggggcactgacggggctctttcccccacccggagcagaattccccttccccacggtggccaccaccccaccgccccccaggaccaaaaccaggctggtgcccgagggcaggaacgtgaccttccgctgcggccagaagatcctccacaagaaagggaaagtgtagtgagtgagcgccccgggcggtcctcggggtgggcagcccgcgggcggccttggggcaggggtgcggggcaggcagcgggggggggctgtgcctgcaggagacgccccgcccccctgcagctggtacaaggaccaggagcccctggagttctcctaccccggctacctggccctgggcgaggcgcacctgagcatcatcgccaacgccgtcaatgagggcacctacacctgcgtggtgcgccgccagcagcgcgtgctgaccacctactcctggcgagtccgtgtgcggggctgagcccggctgataaagcactttctctctgatggctcctcgctcattcttgggagggcagcgggcagccagtctgggcaggtggacaccccagcccctggtccaccgagagctgggcgtcctcggggctgggcacccctgcttccccgcacagcggaccacaggtacagcacaggacgggacgggctttgctaaggtggcccctgggaaagtgggataagaggaggccccagtgacaggggcagcacgtggagcagcacctggggtagccccagaagcctgggttctgtctaggacttgctcagagctgggggagggaggcaaagggggcttcctgaaagatgtggctgggatgggcctccaggatcttctgcaaggagatgtgggtgggggctgggaggactggcacagggtgggggaccaccttgccagagtggaggccccccaggaggtaggagctcccctcctgcctggggaagacactggcccacatggggtcagaggccacagccgcccaccccaccctcttcccctagagcccggtggtctgcgactcccctcccacacatggtcccgggtcactcaaaggacgacacggggagctttcctcgaagaatattttaatacattttaaaactcaacaaccttgtataaaaacctgtcgagtctgctggcacagctggggctgggggttgggggccgggggcctgtgtggacagggctggtctggacgagtgggttggggcaagagggcatcgctcatcccaacacagaaacaggtctccagctccgaagattaaacaatccacccggctcccaccagttcctttccaaatcacggcccagccagccccgtgcgtgtcgagagtgggagagggtgtgtggaggtttgtgctgccccacgtgggcacccgaagatgccctggcaagtcacggagaaaacacagctctttcctccacaacaaggaaaatgatttaattctacaaatttacaaaccaaaatacaaaaacaaaacatggagcacaaagtaagacgaggagttccgagtctcatcgcagctccagccgcagtagccacgcctgtggtcccggctgagttctccccatgacggggtccactctgaccttcagaacttgaggctgaagccggggcccgcggcagaggccccctggttcgtggtggtaaggtggaagcccgtctccttcaggtcgtcgtcaccctgggacgagtcggctaccgtgagaaccctgcccaagccagccccacctgtgggcacgccccacccgccaggcccctcaccagctggctgtagcccaggcctccctcagggggcctcgggctggtgccccgcttcacacgctgctgctcgctcttggcgggccacgtggggaacatggaggggtcgatggggaggggggtctcgcggaaatactcatgcttgaggccgtcctcagcgctgatcctcctcccggggaagtaggtcaggaacctggggggagagggccagaggcccaggaggtgctcgtgtgctccactgggtcccccaaagatgggctgtgttgggacggggctcagggcatgggacgccaggcaccagagcagttctggaacgtggtgagccagcaggtaggcctgggactgggaagtcaccgctatggctcgggacctcccgccacccggctgcactgggctcacttgttcatgaggtcgaagccctggtctgagagcagagccccgaagcgcttgcggaggttgttgtaggggtgctcgctgaaggtcatctttttgactactgggagctcactgtagccgggccagattttctcactgggggtccccagctcctgaaagacagaggtgcttcaacagccacaccaagtggcccacagtgttggcacctgtgtcccgtcagagaagacaagccaccaggagggctctcagtggccctggtccccatctcaacccagcacctgtgcgccccgcagccccattcctgcaactcctctgaaatccatagcgcacctgcggcagggccagacccaccttgaacactttgttgatctgatcgatttccgaattcccggggaacagaggcttctgagtcagcagctccccgaagatgcagcccactgaccacatgtccacggccgtggagtattcctaagacgccaggagaggtgttcaggaaggccagtgcccgcgaagctgtgggaggctgcatgggggacaggggaggcactcagacgcccaggactcaccttggcaccaagcagcagctctggggcgcggtaccactgggtcaccacgaccggggtgtaggccttcagaggggatccgtactcccgcgccagcccaaaatcacccacctgcaacgacagatgggcggctgtgggtgggcctgggcgggtcaccctgggatgggccactcggaggggggctcaccttgaggatgccggcgtggctcagcagcaggttggacgtcttgaggtcacggtgcaggatccagttgtcgtgcaggtgtttcaccccccgcagcagctggatcatcagggtcttcacctcccctgggagggagggaggctcccatgtggacccggccgccccaagcccagggcactcagggtggcccgctcgcctcggcagcaacagaggcttctcagggctttccctgtggatgcagctggccctccctgcagcactgtcaccgcgggggtgaccaggacactgcccccacttgtacgcagacaggaccccggggcgcggctgtacctggcaggaagggctgtttcatggtctccatcaggctcttgaggtcgtgctccacgtagttcatcacgatgtagatcttgtccatgttgctgcccaccacaatctcctgcagggcacggctctgtgggtgctgggcacctccaggcccccacccacccctgcacccgggcgcagatgctgagggacagtaaggacctccggtgccacccgggaggcaaatacttgcttctgtgtggtctgtgaagggctccactaagtgcaggagagtgtaggaagcacccggccccaggacagcacggggccctgtcggaaaagccttccacccggggccaggcgtggtggggccatgctcactctaacggtgacaatgttgggatgctgggccttgaggatggtgttgatctccctcagggacgtgatcgggaagccctccttctccttctccatcttcagccgctttagagccacaatttcatctgtgaagaaaatacagacggcactgagaggcattctcaaagtcacggtaccaacagtggactcgttcagtgaggaccgcaggcagtgcccaaagcgccagcatttcacggaggggggtctcgttctaggtgggggcacgtgggcaccaggagaacgccccagctgaggtctcggcaacacccacggcttcccactcaacacaccacagacactcacagccacctacagccacctgggatcccagcggccacgccgactccacatcgacttccccaacagagccggcctcacctgggatcccagtggccgactcccaacagagttcccggctcacacacctgcttgggtgggacgctgggaacgcaaacctgcacaccagccccggcacagaccactccacgcgctgggcctcggccctgtggggcaggccgcctgctactgcaagggagtggcaaagccccagggccaggctgacctctggcttctagaggtgctgaggggtccaacctccagtagctgctcaggtgaagcgggcccaggtgcagtcgcagctctcgggcagccagcccctgccccacttcccctgcctttgtggggtgaggggaccccacccacctgttttcttgtcttttgctctgtagaccactccataggtgccctcctcgatcctgttcaggcactggaactcctcgacgctccggcagccctgggaaggaagcgcctgtgtgaggtctcagtggccatgccagctggagggagggcggctgcgtccacaggcacggcacacccagcacggggcaggtgcagggcagagccttgggactgggccgggggtggagctgggagcagctcagttctttcaaagtctctttccttgcaaaaccatctgacactttattatgaaacaaaaccagtgtgaacaaaaggccatcccagccaggtgcaagggctcaggcctgtaattccagcactttgggagggcaaggcaggaggattgcttgagcccaggagttcaagaccagcctggccaacatagcaacactctgttttctttttttctttttgagatggagtctcgctctgtcacccaggctggagtgcaatggtgagatctcggctcactgcaacctccacctcctgggttcaggcgattctcctgcctcagcctccctagtagctgggagtataggtacgcaccaccacgccaggctaatttttgtatttttagtagagacaggatttcaccatattggccaggctggtctcgaactcctgacctctgatccgcccaccgcctcggcctcccaaagtgctgggattacaggcgtgagccactgtgcctggccaaaactcttctctacaaaataaaaaaattagccaggcatggtggcttgcgcctgtagttccagctactcaggaggctgagatgggaggattgtttgagcctgggaggtggaggctccagtgagctatgattaagccactccactccagcctggatgacagagacagacccagtctccaaaaaaaaggccatccggagagtctctctgtcaaagtggatgtgtcccctgcttgtaccaggatgacactgaggacgggccctacctgccaggcgcagcatgatgccccatgccagggcacctacccctcggtgtaccttggggccggtgcccaggccggatgtcacgtactctgggtggcctgtggcccgacgcctacgctcagcagcactaaggggcagaggcgctcacaaggcatagggcagtcgacagaggcctgctgcatgcgccagagagaacctctccgcccacaggcaccaaggagggggccgagtccctgccggtctcccaggcccccgaggccactggtaccttctcaggcttgtcccttccaaatcactcccaacaatatcctgccttattgatagctgcctgagcaaaaggcttctggtcacacatctacactgactcccgtagccgctcccccatccaagccctgcacagatgccggtaacaaggccttggtgcctacataacccgcccacgcaggggtcaagtggaaggcactgctctccagtgcggaggaggacgcaactcgggcagcagtgacagcagcgcggccgcacgcccaggctgcctttcaagccgcagagcagtcctgcgggcagctccctgtccacccagttccgtccagcatgagaaagaggcgggacctagaagcatgaggggccagtggctgtgcccgcccgtcactgccccagtgggcccagcagccctgtgaggcgacagacgccaacacgggggccaggcttcgctcagcccctgtggtaactccgactgccaatgcggacagcggcccggggcgaggggagggcctgacctgcagggccggcaggtacttgggcagctcctgcttgagctcgatgggcaacagggcaggggagtcgggcacatagtcgccctctgtcagggcgctgctctgcggcgttccctcacccacttcttcctctgcttcttcactctccccggaatctcggtcgaaccgtgactctggaactggaaaagttgaacctaattacgaagctaggagtaagtaaggatcatgaacctcctcctgccccgggggcatcaagcgcgtggcagggctgccccgtgtcccgctgggaggtgctggcgctgggctctcgtcccctggacacagggcaccgaggcctaagagtgctggcaggctcggctgagacagagcccggatgctgagctgggaggaggcgtcgggtgtcatgtgggggacaagcccacatccacgtccaccaggctgaggacataacctcactgcctgtcggaggctgggccaggcctctgttctgcagggacaggcccggagccaccatctgacgggcctcccctgtggggaactggtcctgggcttcccagctcctcggccctgctgggcactcaggacgcccttggtcagcactgtgcctcgctgaggaatgcgggccccaccggcacagcctggagcggccaacgaatcaggcggcctcccagaccctggcgtgccccacgccgcgcaggaccggctgtcttaggagagggctgctgcactcggagacagacaaggagggggctctgtctccagggaggttcttaccaaccaagaggtggttttcattttctcgttcttcatcttcactcatttcttcctcacttacttcttctgcaagagaaaggaggcgtctgctcagaccagcaccggggcgagtgctgccacaggcaggatgcgggctccgcttcagctaagcaacaagtgttcccaagaatggatatggaggctgggcgcggtggctcacgcctgtaatcccagtgctttgggaggccgaggcgggtggatcacctgaggtcaggagttcgagaccatcctggccaacgtggtgaaaccccgtctcgactaaaaatacaaaaattatccgggcgtggtggcgcacacctgtactcccagctacttgggaggctgaggcgggaggatcacttgaacccgggaggcagaggttgcagtgagccgagatcatgccactgcactccagcctgggcaacagatcaagattccatctcaaaaaaacaaacaaaaagaatcgatgtggaggtgtcccgagagagtcctagatagaagggagtttcaactcccccgcccgccagctacttctctgcggtttctaacactatagtgaagtcacaacacctcacacagtcgtcgcggtgcctcaccggcagactgctctgatgcctcctcagagttgctgccggtctcctcctcctcctcttcctcttcctcctcctcctcctctgattcttcactggtgctcccttcctcctcctcctcttcctcctcctcctcttcttcctcagaacctgagcctgattccgctgtagaaagacagcagagcagagggtgaacctgggccttcctgggcagcagtggtcaaggccttggccaggcggttccaggtacctgacgaggactcggccgagctggtcttcctctcgctgtcgctgatgtcctgtaagtcggacagcaggtccctttcttccattttctcttcttttacttatgagataaaccataaaggtgaatttggggaaatgtttttaaacaaacaagctaccaccaccccaaaactagtgcctttcacgtaacgattaactttgcttggtcggaaaccagctcatccacagacgctggaagccacttctctaacggggccagtggcgaatgtcccagcggataaacacacgtcctgtgtcctggccgcacacagacactcacggtccctctcacgacacgagaggacttcagccagcacatctctcactttcttctgaagcggttacttagctgggctttaaatgaatcctacacacttatgccaaacatcccccagaaaagactcacactgtgctggcttctgcgcaggcgccggcctggcctcacctggcttccggccgtctcccaactcgaaccgctcccgcggcggccgaggcgggctgcgactccagtggctggctttcactttgtcgctgtagtcctctctcatcgttcggtgatgtgcagacactggcgcgcagggcagagagggagatggcactagcagcactgccttcctcaaaaggccccacccggcacagctgcctcgtctcccacacccgcacctggcagacacacccacagcgtgcacagggtgctgacagcatcggggtcagaggccagaggtctcccaggaagcccagggagaaaaagctccaacctggaggccgtgagcccgaggacccaggtggaccttctagactgatcttcactggtcaaaaaggaaggggcgggagaagattctggaaagatggagtaggaagcactgggaatcagtctccccaccgagacaacacttgcatcacaggatcaggcctgtgcaactactgaggtgctctggagtctactgaaggtttgcaacttcagggggaatcttggagagtaaactgtgattcattaatcaacgtcaccgcttcgcacattagtggctcccacctcactccccgctggcaggcagcagcctgcatgcagctcgccggacccaggtgggcagacggacacacacacccgaggtcagtgtgatgactgcgtgtcccaccccagaggcatgaagaggcagcagccacggccacccccaagctgaaggtacttccagggcatgagcaccacgtcccccgttgcccccttcatttctctctattccccctttaggaggcagacacttcaggacaagaacattaaaaacatctgtattgacgggaacgttaaaaagtggctgcacgtgaccaggaaaaggctcaggctcagaaaagacccgtgaagaccctgagtttccacaacaggccgaccccacagacacagcccagcacaaccaaaacaacaagtgcacacccttgagtggggaccaggaagaatcacatcatgagaatcaaatgtccatttttttgactaagaaaaacacaagagaaacaaagaaacaggacagtatgtcccattcagaggggaaaaaaagaagccaacagacacggttcctgaaaatcacctgacggtagatgtcccagacaaagattttagggaactgtcttaaaccttcagttcctcagagaacgaaaggaagatgtggagaaagtcaagaaaatgacgcgtgaacacgacggaaatatcaacagagacagaagatccaacaagaaaccagagagaaattccagagctaataagtacatgctcacaatagacactaaaaagtaaatattcacaacagaaactcacaggcagatgtgagcaggcagaagaaataatcggtgagcctgaagacaataaaatcacatcgtctgaggaaaagaaagcagaagagactgaagaaaagggagcagtgctgagcggcctcggggaccccaacagatctgtgggagcccaggagggaggagaggagcagagagggtatctgaagaattcctcaaaacccccacattggatgaaaaccgtaaatataaacattagagaggctcagtgaactccaggtagaatgaagtcaagaggcccacaggaaaacccattattaaacagttgaaagcctaaggcaaagagaatcttcaaagcatccaagggatcctcaattaggtcatcagattaaagcatccaagggatcctctataagatcatcagatttctcatcagaaactttggaggccagaagacaatgggctgaaatagtccaagtgaaaaggaaaaactgtcagctaggcatgagggttccttgagcccaggaattcaagaccagcctgggcaatacagggacaccttgtttctactgaaaaatgagccaggtgtggtggcacacgctacgcctgtaggtcccagctacgcgggaggctgaggtgggaagatcacttgtgcccaggagttcgaggttgcagtgagctatgatcgctccactgcactccagcctgggcaacagaagaagactctgtctcaaaacaacaacaacaaaattgtcaaccaagaaccacgtatccagcaaactttccttcaaagatgagggagaaatgaggatattctcagataaacaaaagcagagggagttcattactactagacctagacctgccttgaagaataagctccagggagttgtgtggggtgtaaggaaaggacgcgagacagaaaccggaagctgggtgaagaaataaagatctccattaaggtgaggacgtgggtgactataaaagctcgtactggccggccgcggtggctcacgcctgtaatcgcagcactgtgggaggccgaggtgggtggatcacgaggccaagagatcaagagactattctggctaacacggtgaaaccctgtctctactaaaaatataaaaaaatagctgaacatggtggcgggtgcctgtaatccctgctactccggaggctgaggcaggaggatcacttgaacccggggggcagagggtgcagtgagccgagatcgcgccaccgcactccagcctgggggacaagagcaaaactctgcctccaaaaaaaaaaaaaaaggcaggggcgaaaagcaagcaccggaaccaagcgcccgcctgtgacagcaagtgcccagcaccagggggcagcagacacgcgtcccgccgagcacagctgcccaccgcgccgcctaccttccctgcgggcctcccgctccttgcgccgctcctccgcccgccgctcgcgctccttctgctcccgctgctccttctgctgctcccgcatcttgcgctcccgctcccgcttcctttctaactgctccaagcggtccctgaagaggcacacgccatcattccccctaaacagaagcttgcttatcgcgtttttgtccacatttgtaagctggctttctacgtaattcaatccgtgaagtttttttttcatttttttattttattttctttgagacggagtcttcatctgtcccccaggctggagtgcggtggcgcgatctcggctcactgcaacctccgcctcccgggttcgagcgattctcctgcctcagcctcccgagtagctgggattacaggcgtgcgccctgtactcccagctaatttttgtatttttagtagagacgagggtttcaccatgttagccaggatggtctcaatctcctgacctcgtgatccgcctgcctccgcttttcaaagtgctgggtttacaggcccgagccaccgtgcccagctgccatttccaattctaattaataaatgatccatttctttccattcgatcggtgtttgcttcatggattttgggctctgtggttagatgcattcacatgtatcattgctgtatcttcctgctgtattggcctgtttctggctgtgaagtccttgctccttcttgtttctagctttttttttttttttgagacagggtcttggtttgtcacccaggctggagtgcagtggcgcaatctcggctcactgcaacctccatctcacgagttcaagtgattctcatacctgagcctcccgagtagctgggattacaggtgtgcaccaccacacccaggtgatttttgtatttttactagagacagggtttcaccatgttggccaggctggtttctaatatttcttaacatctgttttgtctggtatgagtacagccattcaagctctcctatgacagctgatgtttgtacgctgcgtcttttcctgttctctagcagacagcatacagttagatcttgtttttctatctgataatctgccctgtctgtttggggcacagagacctttcacatgtcatataattacacgtacagttggatttactttccttgctttgttgtgtcttttttattcttccctttttgattttaaattacatacgtttagcataccattttaatttatttgtactttttagaacactaagaaaacaactttcttagtggttgctctagggatcaccatatgcctcatgatactagctcaagtccagtacaatataaaactgttgtaacacagcttcattccctgtcttctttgtgcagtccatttatgccacataccacgacaacagtgtaattattttacacaatcgtagttccagtaaaacctaagatgtgaggagagatatttacaggatattgacgtcaacctacacttgctatctgcagtgcctgtccttccttcctgaggattcaagttaccgtctggtgtcatttctattcaacttgaaggtcttcctttagtatttcctttaaggcaggtttcgccaacaatgaatcccaccagtctctgcttctcagggaatgtcgttcgttccctttcacttgtgtagaacagttttgattcctggctgatggttcttctctctaagcagcttgagtatgccactccactgccttctggcctccattgtttctaagaagtcagtggctggcggtattgaagctcccctttcatgggatgggtcattcttctctgagccctttcaacattttctctttggcctttgccagtttgactatgatgtgactttgcatttattctagttcaaacttcctgtgctcttgaatgtgcatattttttaattaaaatttggaaagtttttaaccattattgtaacaaatatctttcctctctcctggaacccccattcgacgtgctttggtacagcagatgttgtaccacgggtttctgaggctctgtgcatttttcttgtttttttctctctgttcttcagaatggataatttctactgctccatccacaagttgtttccaagcctttactaaattcaacatctggacactcaagacagtttctactgatgatgttcttcctcagtacgggtcacactgtcatacttctttgtattttagataatacatttgtagcaattctggattctaagttttccctttcgttgttaccaccaaggcctgtctggttgtccgtgaaatccatctccctcatagctcatggccaccccgttccttcccacatgcctattttaattttcaaccttggcttcctaggggtcaccaccatggctgcacagcttagcaattagccagcactggaaaaaggctgggctcaaatacctcgagcacagtaaggcttccttggcccacggctgtgtgtggacagggagcacactgaacgttcaggcgtcattcgcatctgtggcggcttctattttctgctaggtcctttcacgcagctgcatcctcagggctggtcacaagtgggtggcggctcgagctctctccagtctctgctgcacgtctttggcgggatcacagctgctcccaaccacactgtacttcattctagcagacctcttggccttttcctccctccactgaggatgctggtgggcaaggccactgcccactgctctaaacggagtaaccccttccaaggcagcaaggaaactgcaggtcctgcagctgccctgtcccagtggaacctccgtgcttccaagtgcagagtggaagcagtaaagggagcagctctcaggccagaaggtcagattcttactgcttttacccacagctcagcagttttccaagcatcagtgcttctcagattatccttatcagtttcctttttgtcagagacaaggtctctctacgttgcccaggctggcgtcatgcggtcctctggccttagcctcccacgtagcatatgctaccacacccagttctggattggctgatctgaatcggccctacccagaagtctgcccccaacaatttttgttcattcactctcctgtctttaccttctgggaaatcaatatgacagcccaaatttcatctaccaacctccacttctatcccaagctctactctcgtgggacaagacacactcaatgtctggcacagggcgtggcatacatgaatgtttcacacactaacaggaactaggccaactgaaaccttgctcacccagcagcggtctcggaccttgacccctgggcctcagtgtctcccacacccttcggcatcaacaagaaccagcgccctctcatcatctttacatgctgtgtacccagccctggctgctggcaaacatcgctgcacacgcccttccgcttcagactcctctcttcctggagcagcttgcaagctttctgtggactcactctgaaggcggagatgggcctgctcgcacctggcctacagcctttttcctggttcacagaacagatctggggctacaccgatgttctttcttgggaatctggctcataaaggggaacgaatatacagactaatggccaggagtcctaggagtccagtgtcccgatttccagactgtttcaaggtttttgggatctcccttctcctttttttgagacagtctcactctgtcaaccaggctggagtgcagtagcatggtcatagcttactgcagccttgacctcccaggctcaagggatccaaccacctcagcctcgtaagtgctggaattctagcgtgagccactgcgcccggcgggacgtgcagatttctgatcccttcattgtcttccctcaatcaaatcacacccgttcttacttccagatgcagtgaaaactcactccctcaggacagttctcttggtcagcctcgtccagcgttcactgtgctgtttccatgtctaccacttctgcaacaaatgtgacttctattgccaaattcttcttcattgctgtgacaggacacactaccacggccctttcataaagtcctcaactgacccagcccactcacctttctctcctggaatgctcccttgccatttcccttctcttctgtctttcccattcccggcgagctttatcctgttcttctcgatgtcgtttccgacgttcgtgctctctttctttcactctagcatgcttccctaatgagaaataaagtgtcatgcaaagaaacctcacttcaaaaatttcacgaggccgggcacggtggcttacgcctgtaatcccagcactttgggaggccgaggcgggtggatcacctgaggtcaggagttcaaaaccagcctggccaacatggtgaaaccccgtctctactaaaaatacaaaaattagctgggcgtggtggcaggcacctgtaatcccaggtactaagggaggctgaggctgtagaatcacttgaacctgggaggtggaggttgcggtgagccgagatcgtgccactgcactccagcctgggcgaaaaagtgagactccatctcaaaaaaaaaaaaaaaaaaaaaaaaaaaaaaaaaaaaaatcacatgaaaatgaaattaaatcaagaacattaaatatttaaataatgatgttaagtaatcctaatctttttttttttttttttgaagagacagggtctcactatattggccaagctggtcttgaactcctgggctcaagtgatcctccatccttgtcctcccaaagtgctgggattacaggcctgggccactgcacccagtcgaataatcatgattttatgttaaataaaaaactttgaaaatagaaaactatctgcagtaagcgtctaattatgaagaaagaagaaaaaagaaaaacaattctgctatcacagaagagaattgtaatattcatcttttaaaaattttctatactgaataaactataattatcagttttataatacaaaaaccactcttcacaaagactacagaacaaagctttgctatcagtgggcttctccactgtgcaatgaagccacattaattaatcaagcgtatttataataatgagatttcaatcgggctccaggtccaattttcctaacacccgtaagaatctcctgatgttggtacgagatcaaactgctcaagcctaacccattctttggacttgagcaaatacccattttggggtgtgtttttctcctatacttgttgaattcaggtcattttaaatgtaaacaaactgctcccaaacaatataatgggggagagaaaaccccagaggaaaaatggactagccattctgaatggtctgtgacacacgcacgctttcagctagagtttgctctctctggttttcggtctgtgacacacgcatgctttcagctagagtttgctctctctggttttcggtctgtgacacacgcacactttcagctggagtatcctctctatagcccctctgaacggtctgtgacacacgcatgctttcagctagagtttgctctctctggttttcggtctgtgacacacgcacgctttcagctagagtatcctctctatagcccctctgaacggtctgtgacacacgcatgctttcagctagagtttgctctctctggttttcagtctgtgacacatgcatgctttcagctagagtattctctctatagcccttctgaatggtctgtgacacacgcatgctttcagctggagtttgctctgtctggttttcggtctgtgacacacgcatgcttttagctagtttgctctctatagcccttctgaatggtctgtgacacacgcacgctttcagctagagtttgctctttctggttttcggtctgtgacacacgcatgctttcagctagagtttgctctctctggttttcggtctgtgacacacgcatgctttcagctagggtattctctctatagcccttctgaatggtctgtgacacacgcatgctttcaggtggagtttgctctctctggttttcggtctgtgacacacgcatgctttcagctagagtattctctctatagcccctctgaacggtctgtgacacacgcatgctttcagctggagtttgctctctctggttttcggtctgtgacacacgcaggcttttagctagagtttgctctccatagcccttctgaatggtctgtgacacacgcacgctttcagctagagtttgctctctctggttttcggtctgtgatacacgcacgctttcagctagagtttgctctctctggttttcggtctgtgacacacgcacgctttcagctagagtattctctctatagccattctgaacggtctgtgacgcacgtatgctttcagctagagtattcttttttttttttttgagacggagtcttgctctgtcgcccaggctagagtgtgcagtggtgcgatagcggctcactgcaagctccgcctcccaggttcatgccattctcctgcctcagcctccagagcagctgggactacaggtgcccgccaccacgcccggctaattttttgtatttttagtagagactgggtttcaccgtgttagccaggatggtcttgatctcctgaccttgtgatccacccgcctcagcctcccaaagtgctgggattacaggcttgagccaccacgcccggccttcagctagagtattctctctatagcccttctgaatggtctgtgacacacgcatgctttcagctagagtttgctctctctatagcccttctgaatggcctgtgacacacgcatgctttcagctagtttgctctctctggttttcggtctgtgacgcacacatgctttcagctagagtttgctctctatagcccctctgaatggtctgtgacacatgcatgctttcagctattctctctatagcccttctgaacggtctgtgacaccattatgctttcagctacagtttgctttctctggtttttcagtggtgctctggggaaggcagaagagtaggaacaggaaagaaaccacacttgaacatgatgtcaaagaaagtaaatgcttctgtacccccttctgctgaatggctatgatgcctacatttttcttttctcttttcatcttttctgtgatgaactttttctttccgagacatttgctggggtggtttgatggccaaagaatcatcttcttctcctctgaaataaaacacaacagcactgcgtcatgcttgagaaagtgcggaaaagcatcaggctattatgaggttttttcaacccagaaaaatgcatgattcagataggaacgaagctgaaacatcatttaaaaaattacattaattctccaacttcaggcatctttttttttttttttttttagacggagtctcgctctgtcacccaggctggagtgtagacacgcgatctcggatcactgcaacctccacctttccgggttcacaccattctcctgcctcagcctccggagtagctgggactacaggcacccgccaccacacccagctaatttttgtatttttagtagagacggggtttcactgtgttagccaagatggtctcaatctcctaacctggtgatctgcctgcctcggcttcccaaagtgctgggattacaggcgtgagccaccgcgcccggcctaggagtcttaagattcagatgaaaaatgtaagaaatcaatgttttgtgcagatggaacgaaatgcctctcagaggacctgcagggggtgaggggcaggttcattagcttgactgtggtgacagtttcaggggcatgtaaaaatacatcacatcttatttatttaatttaattttatttatttatttattttatttgagattggagtcttgctctgtcgcccaggctggagggcagtggcgagactctcggctcactacaagctctacctcctgggttcatgccattctcctgcctcagccttccaagtaactgggactacaggcgcccaccaccacgcccggctaattttttttgtattttttagtagagacggagtttcactgtgttagccagggtggtctcgatctcctgaccttgtgatctgcccgcctcagcctcccaaagtgctgggattacaggtgtgagccgccacgcccggcctgtatttatttttttgagatggagtctcgctctgttgcccaggctggagtccagcggcgcaatcttggctcactgcaacctctgcctcctgtcccaggttcgagcaattctcctgcctcagcctccggagtagctgggagtacaggcgtgcgctaccacacccagctaatttttatatttttagtagagacggggtttcaccatattggtcaggctgatctgaaactcatgacctcatgatccacccgcctcagcctcccaaagtgctgggattacaggcatgagccatcgcacccggacttattatttttttcagacagaatcttgctatgtcccccagggtagaatacagaggcacaatcttggctcactgcaacctttgcctcccacattcaagcaattctcctgcctcagcctcctgagtagctgggactacaggtgtacaccaccatgccaggctaatttttgtatttgtagtagagacaggctttcaccagtaaccctaggaaagagtaaacctcaatagttgtaacagcatgccctgtcacagtaatcctaggtcgtggctcgcacctgtaatcccagcattttgggaggccgaggtggacggatcaccaggtcagaagatcgagaccatcctggctaattttttgtatttttagtagagacggggtttcaccgtgttagccaggaggctgaggcaggagaatggtgtgaaccagggaggcggagcttgcagtgagccgagatggcgccactgcactccagcctgggtgagcaagactcttgagacaccgtctcaaaaaaaaaaagagtacacttcagtatttacaacagcacactgagcacactgtcacagtaaccctaggaaagagtaaaccttaatagttacaatagcacaccccgtcacgtaaccctagggaagagtaaacctcaatagttaaaacagcacaccccgtcacagtagccctaggaaagagtaaacctcaatagttacaacagcacaccctgtcacggtaaccttaggaaagagtaatctcagtagtacaacagctacaacacgccctgtcacggtaactctaggaaagagtaaaccttaatagttacaatagcacacagttgtcacagtgaccctaggaaggactggccaggccagggctgtgtacagttgggtcttgcacatctgtacatccgctcacctgtcttccattgagtcttctcttctatacggggagttccttattgtgatctccatgcagtgatctctcagctccccctcctcaagggaatcccgcttggaatcccggtcatcagactaagaagcaaagagaaagttaatcattttctttataagtttttttttcttcatagataaaagtatttttaatgataatcaaacctgggcaacatcccaaaacaaactttcacatgtactctgaatgagccagtgttataaaatataaagaatttttggccaggtgcagtggctcacgcttgttaatcccagcactttgggaggccgaggcgggtggatcacgaggtcaggacattaagaccatcctggctaacacggagagaccccatctctactaaaaatacaaaaaattagcttggcatgttggtgagcccctgtagtcccagctactcaggaagctgaggtaggagaatggtgtgaacctggccctgggcgacagtgcgagattccgtctcaaaaacaaaaaaaaagctaacaaagtgagcacatgctattggaaaaatactcaaagcagagttgctacaaacctttaatttggaaaaatttcaatatctgtgaagcataataaagtgaagtgcaaggtatgcctgtactcactaacatcccaaatgatgctacaaatcttagcaaaagaggtactttgccaatgcctcttaccaaattactaaaaaggtttcctgagtacattaccatgcaaaccaagaaagacgtaaaatatttatattaatttcaaggcaagttcccactatattaaaaatacttagagatagtattatgaatatactaataatgaaccgagaaaaattagtccagttttgctaatgacttaacattcaacgtattttattctccatgtatgctcaatctagacacagctttagtgtgttaaatctgcctttaatgtcaactgaatattagaatacattttgggctcacctgcgacatttggaagtacaaaagaacttcaccgaagaagcgttgttctaatggaaaaatgagggcaaagaaattaaatctcctttaagaaaaccacttacttaaaaaaatatggcttacattttttaagcgttttatctctgctttctcctcttgttccttccttcgtttcttttcctgaagaatttcatctaaagttttcactttccaagagtccttttcatcacccatttgagttaaaacactgcaaaaagaaaaataattcagcctacatcaggacacagcaagctatggtgctgaacacttgaacctagtcacttttgagggattcagaataaatcctcattaagaataagaagttgtgcccggcgcagtggctcaagacggtaaccctagcactttgggaggccgaggcgagcagatcgctggagttccggagttcaacaccagcccgggcaacatggcaaaacctcgtctctacaaaaaatacaaaagttagcccagtgtggtggcgcgtgcctgtattcctagctacaggaaggaggctgctagaggcaggaggatcacttgaatcagagaggtcaaggctgcaatgagccaagactgcgccactgcactccagcctagataacaaagtaagacttggttaaaaaaaaaaaaaaaaaaaggtaagctctaggctgaggcgggtggatcacaaggtcgggaggtcaagaccagcctggccaacacggcgaaaaccctgtctccactaaaaatacaaaacttagctgggcgtggtggcgggtgcctgtaatcccagctactcgggaggccgaggcagcagaatcgcttgaatccgaaaggcggaggttccggtgagccgaggtcgcgtcactgcactccagcaagaccccgtctcaaaaaaaaaaaaaaaaaaaaaaaaaaaaaaaaaaacaagaatgataagttgtaagccaggcaaggtggcgagcgcctgtagtcccatatactctgcaagctgagatgggagaccgattgagcccaggagttccaggctgaagtgcgcttgtgaacagccactgcgctgcagcatgggcgacaaaaaagagtgatgggttctgaaaaatgaccgcttgaaatcaagtctcgtttctgtcattcttgtatggtcttgggtaacgtaattcacctcagttcagtcttccgtacaaccagaataacaacacctacgtgatagtatcgatcgcggattaaagatcatccgtttaaaggctcttaactcaggacctgccactcatcaaacactgcttttactgtcagaatctgctagaaagaccgcttggactacgtgaagccactagcacactggacagctgcaccttgagaccggggagatgctccgagatgtgctcgcgaacaaggccacctgacccgggcactgggctatttcctcgggttcagtcccgcacacttgaggttcagcctggcagacgttggctccagacagcgtttggacccgccgcctccaccacccaaagttccgtgcgggatgagactgtccgcggaagcgagggtgtcgctcgcccccgggcccgggtccgccccgctccgaggcctgctcggaagaaagacctcggtgcgcagttctcgtcgcgctcccacacctggtccgcccagtcggaactcacccctacggggccgcggccggtccctgagcctgagaagaaacagcaaccggcgctcgccagaagtatcctcacttcctgtgttgacgcctaatgatgatataatagccgacctctggcccagaactcaagacgacaggggctcgctctgtgcggcacttcctgtgtctgcgcgggatgatgacgcataaaacagcgcttgctcaggtccaggactccaaaagaaactgcgccgtgagctgcacttccgacttcggcgcgggccggggcgccgagcagagcgacgccgacttttggagcagtttgcgcctgcgcggaacgcgtggccggcttccggaatcctaccgggacttttccggtagcgaagcccgcgcctgtgccaaggcttgcgagcagaatgccttcgcgatggacgcccgcattccacccccttgaccgctgggacccctagtggcgggtgggtggagcgcgctccatttacctgctggttacctcgtgaggcgcctcaggtctgtgtgtcttgtaaaggccgatctcggaatttaactctgaaccttactcagaaacaaagcagggagagctcttacgatgtgattttattttatttattcatgtatttacttttgagtcggagccttgctctgccgcccaggttggagtgcagtggcgtggtcttggctcactgcagcctcctcccgggttcaaggaattttcctgcctcagcctcccgagtagctggaaccacaggcccgcgccaccacgcccggctaatttttatatttttggtagagacgaggtttcgccatattggccaggctggtctcgaactcctgacctcaagtgatccgcctgcttcgtcctcctaaagtgctgggattacaggcgtgagccaccgcgccgggccttttacaatgtgattttgaagctgacactggcagtgggtcctcaaagtgcagactcactgggtatggtgcttcccccaactcccagggccccactccaaacccatggattcagagcattgcaggagaagaggataaaacgagcaattaattccctttccatatgtcaggttttcctcttgccttgaaaagtcacagaaaaatgctttagacatctgaatctcaggaaacaaacaatggaagataaacatccgcatttactgggcctgaaatgggaaaatgaaagatgtggcaagaaactgacaagggcccaagaagggcgatgggtatcggaattcttttcatcccggaatgaaatgctgcttgctttgtgtacccaagctctttttttatttttatttttttgagacggagtctcgctctgttgcccaggctggagtgcagtggcgcgatctcgggtcactggaagctccgccacccggattcacgccattctcccgcctccactccattcgcccgcattaggctcctgagtacctgtgactacaggcgcctgccaccatgcccggctaattttttttttattttcggtagagacggggttttaccgtgttagccaggatggtctcaatctcctgacctcgtgatcagcctgcctctgcctcccaaagtgctgggattacaggcgtgagccaccgcgcctggcctcccccaagctcttaatgttgcttcctgagttcttggtaactggggaaatctccctatttttttatttttatttttttttgagacggagtcttgctctgtcgcccaggctggagtgcagtggcgcaatctcggctcactgcaagccccacctcccgggttcaacgccattatcctgcgagcctcagcctgccgagtagctgggactacaggcacccgccaccgcgcctggctaattttttgtattttttttagtagagacggggtttcactgtgttcgccaggatggtctcgatctccttaccttgtgattcgcccgccttggcctcccagagtgctgggattacaggcgtgagccactgcgcctagctatttttattttttctgatagggagactcgctctggcccaggctggagggcagtggcgggatctccgctcattgcaagctccgcctcctgggttcacgccattctcccgcctccactccattctcccatcttaggctccagagtagctgggccaccatgcccggctaattttttgtatttttagttgagaccgggtttcactgtgttagccaggatggtcttgatctcgtgacctcgtgatctgcctgccttggcctcccaaagtgctgggattacaggcgtgagccacagcaccctgcccttttttttgagaaataagtctcactgtgtcacccaggctggagtagagtgacacaattttgggtaactgcagcttccacctcccaggttcaagtgattctcctgcctcagcctcccgagtagctgggactacaggcgcccaccactacgcccggctaatttttttgtgtttttagttgagacggggtttcactgtgttagccaggatggtcttgatctcatgaccttgtgatctgcctgccttggcctcccaaagggttgggattacaggcgtgagccacagcacctttttttttctgttttgagagaaagtctcgctgtgtcacccagactggagtgcagtggcacaattttgggtaactgcagcctccgtctcctgggtacaagtgattctcctgcctcagcctcccgagtagctgggattataggcgtgcgccaccacacctggctaacttttgtatttttagtagcgacagggttttgccatgttggccaggctggtcttgaactcctgacctaaagtatctgcccaccagcctcccaaagtgctggaattatagtcatgagccaccgtgcccggccaaaaatctccagtttacccttcctttgtgaaatctgttgagtacccaaatgcagccactcatgtcaaaccctaacaaaatcgaccccagagcccacgaggagggggtggcctcgcacttgcgcttgataggagctgccacaaaggcctttcccaaccagaactttgggtccagccacttctgtgaagagcctctttgctagcaatagccagccccaccggtgaacaaagtagcatgaacaccagaggtccacaaggaagaaaacaaagcagtccatatttaacatttattttactttgctgagcaagaatcatagacagctactaccacggctgcttcgtttggacaaaaataaccaggaggcatccacgggattagttacacggtatcaacttaccaccacagcagaatcaacagtgactcgctaattaacagaaccgtttgctagaaagcactaatctagttatataaatactgaaataggtcacatgcaaaacactataaacgttttgtgtgatgtacttttagttctccatagttttgtttggtataaaggaaatataatttggctgtgacgtagactgttgatgtaattttcaagttttcctgtatggggaaagttgccctgactgtggcccttttcaaggtggagcctccaacaccacgttggcagattcagactccgtgaacagtctaaatgagcaagtcagctgaatgccactttcagatggaagggaaatgagatggaaaacaacaaaaaaggactgccaggcggaacagtttccaaccgagttttcgttgagtgaggatccagcagccatcaaactcaaacataggggcccgcagggaaactggaggaaatacttcagagacagcaaagctgaaggtttctgtgctctgagggatccgagagtggatgtcccactcctgtatcctcagccagacacagaactagccagattcattagggaagctcagatgctctcattctataaagtaaggcccccagcagggcacgtacatacattgggaaagaagaaaccccttagtaccatgttggtcaaaggcaagagagagaattctatttccatctggaatgtcattcttgtttacttcttccaacagtgaaatacttccaggccttcgaaaggccatcctttggacacatgtaaaaagctgtcttgttggcccgttattcccactgacccgtctgagtgatcacccaggagcgcggcggcagcaagcagagctcaccggatttgggacaaggattttaaaggcagctacaaagctgagctctatttgctgatgatagtctctgttcagctgtttaaaatgactgtctgactcaccatggtaatttttcacaaattaaaaacacattttgggttgtgcaacagtgttctcatctttccaggcaggcagattattttaatgctgttatacagggaattgggactctcggattttcttttttaacctttttatgcctttcagtaggggaagtttccttgaaagttagagagctgcaaatctctaagtatcaatgtaaagaagccgatgacccaattcggaaggtggttcaagtgttctgtttgtttacaaaggcacagaccacgaccatggacacacccagtggaagtaaccacacccggtgtgttcctagaagctcatctgtgacagttcaacaagaacttactattctagaaaagtattacacaaagttatttaaaaaaatgtctgtacaatcgttaacacggccaagccaggccttgggttttgcctcttggtgtccagctgtgctgggaatgccatgaagaccagcggctggaaactgacttgggcatggagaagagactgagggagagggaggggacagcacgactgagcaagggcacagtgctggctgcctcatgggctccaggctccttctgccaggatgaggaagaggccccagagcagcgttacacaggaaatcaacctatttgctaatcctttggaaaaacgtttgtttctggtccacaaacagaaaatccaaacaggatggcagctccttgtgagggtggaggggagggcaccagattctgtgcggctggaaattccaaggtgctcagaaccaggcgcctgcacctctccttatgccagaccacaatcttcaaagaggccggcagccatattctcgatggggaggtggacaaggccaccctgggagttgctttcaatctgtcctcacaaatcaacaactccccgccacctccagagcattttctaatagtgtttgtttttgagacggaatcttgccctgttgcccaggctggagtgcaatggcacgatcttggctcactgcaacctccgcctctggggttcaaacaattctcctgcctcagcctcctgagtagctgagattacaggcacccaccatcacacccagctaatttttgtatttttggtagagacagggtttcatcatgttggccaggctggtctcgaactcctggccttgtgatccgccatctgcagcctcccaaagtgctgggattagaggcctgagctaccgcagccggtcttctattagtttttgaggaaagcagaaaaaaagaaatggaaacccagggaaagtcacgtgacaaaacatcttcgcagcgcagtgagcacacacctggcctgtcctccacacacaggtcagcggttttatagaagcggctgaagcaggtgtagtagcccacgcctatattctcgacactacaggaggctgagtgggaaggattgcttgagccgaggagttcaagaccagcctgggcaacaaagcgagagcccagctcaacaaaaaaatagccaggcatggtggcacgtgcctgtggttccagccacatgggaggctgaggtggatcacttgagcccaggaagtcgaggctgcagtgagccaagatcatgccactgtactccagcctgggtgacagacagagcaagactgtctcaaaaaaataaaaaggttacttgtgggttaaaaagcctcacttcggtccatcatcatggcagacttttttgagtaggtagaagttaatgagtcagaattattgctctgtttctgaacgattttatcttcaggaggggctatttttgtatttcccaggtgagaagccaaatggaaaaccagtgaagtgaccatgggtgccaaaggcctaaagagcaggcagggaaatgagactcgggaccactggagccccatgctgcctctgacaagccctggagctctgggtctcaaaggctggctggcaacaggctgcaccgggcatgggaatccgccggctgcgagattgggggtaaagagctcagacatggtcagaagcctctgcctaacacacggctccagtagccactcctcaggcctcctgcgccctcgggggtgcgtgacacaggaggatgagttgagctggctggtggccccagtgtgccgtactactgtcccttggggagagtgggacagggtgggcgcctgacacacaccacgcgccccagaaacattcagtgtggacgtttcctttttcagcaaggacggcgcccaggtaaacgccacgtaacccaaaccatcaacactgcagcgtcctgcccaaggctcacgtggggaaccggacaggtgctagatgatgataggaacggtgggctctgagggaggacagacaggctcaccccacggggacctcagaacagcctgcctcatactcagagtccaaaaaagaaaaggaacgtacacatctcctcccaagttaaacacgagaggtttgtcctcaacctcagggctggaaaccaccacaggtaggaggctgggcacgggggctcggcctgtcatcccagcactgtgggaggtcgggtgctagaatcccagcactgtgggaggccaggcacgggggctcacgcctgtaatcccagcactatgggaagctgggcgtgggggctcagcctgtaatcccagcactgtaggaggccgggcgccgtggcgcatgcctgtaatcccagcactgtggatggccgaggcaggcggatcacgaggttaggagttcgagaccatcctggctaacacggtgaaatcccatctctgttaaaaatacaaataactagctgggtgtggtggcgggtgcctgtaatcccagctacttggaaggctgaggcaggacaatagcttgaacgcgggaggaggaggctgcagtgagctgagatctcaccactcactgcactccagtttgggtgacagagcgagactctgtctcaaaaaaaaaaaaaaaaacaagaacatctcccacacactcacagtgcctttgtagccccagggaaagcaatcccttaagatcatttgttgggtgaaaagggtaccaagtacacagtgttaggaccgtgcaaaaaaagggtgacaggaagtaccctttgcaaactttccataatgtgtacttaattcactgctcttataaaatgaaattaaataaaacaaaaaaatactactgaaaaataattgggcaacatgcggtggctcacgcctgtaatcccagcactttgggaggccaaggcagacggatcacctgaggtcgggagttcgagaccagcctggccaagatgatgaaaccctgtctccactaaaaatacaaaaattagctgggcatggtggcaggcacctgtaatcccagcttctcgggagactgaggcaggaaaatgtcttgaacctgggaggtggggttgcagtgagccgagatcgcgccactgcactccagcctgggcaacagcgtgagactctggctccaaaaaaaaaaaaaaaaaaaggaaaaataattgggctgagtgtggtggctcataattgcagtcctagcgctttgggaggccaaggtgggtggatcacttgaggccaggagttcaagatcagcctggacaacacagcaaaatcccatctctcaaaaaaagtaaaataaaataaaataacaaaaaacaaaaattagcccagcgtggtggtggacacctgtagtcccagctactcaggaggctgaggcgagaggatcacttgagcagggaggcggaggttgcagtgagctgagatggcaccaccacactccagcctgggtcacagagcaagactctgtctcaaaaaaaaaaaaaaagttttttttttttgaaccactgctaacaatcactaatgttcactaaaacactaggcttcaggagcatttggaaataattcctgaccgcacaaagaaacatgctggtgagagacagtgaccaagcccaggagaccaccatgagttccagaaaaagtgagagagagcggccacttttcctgtctcggagatacctcctactcaggacgcaggaagcatggggcagggcagcgccatggacaaggcgactcggtgcagggcctgcgggacctgcaggtgagaggaagcacaagctccagctcctcagctgtggaacgctgcgtgcgtggtgcacagctaccagctcggatgggtatttgagaatttaccgcactgacttggaccagacggaaagcagagaagagggagagctacacctgactgtccaccattcccgccagccccaacgtcggcttttcacttcatgtttggggacaattacacctcctcatgacagatcagaagtttcagaaaaaaggtccgctgatttccgcaacagggtatgaggtggccagctgctgatgccagctgcatggactcctatacttgctggtaacataacctcattcctttgtatttgccaccaaaaagtctccagtctttttttttttttttttttttttgagacggagtctcactctgtagcccaagctggagtgcagtggcacaatctcggctcactgcaacacccgcctcccgggctgaagtgattctgatgcctcagcctcccacgcagctgggactacaggtgcatttcaccaggcctggctaattttttgtgttttagtaaagacagggttgcccatgttgcccagggtggtctcgaacccctgagatcaggcaatctgcctgccttgacctccagtccacctggctagtctccagtctttaaattgcacctttggccgggtgcagtggcttgcacctgtcatcccagcactgtgggaggccgaggcgggcggatcgcctgaggtcaggagtttgagaccagcctggccaacatggtgaaaccccgtctccactaaaaatacaaaaattagccgggcatggtggcacgcgcctgtaatcccagctacttgggaggctgaggcaggagaatcacttcaacccgggaggcggaggttgcagtgagccgagatcaaaccaaagaaatccagctctgggtgacagagcaagactctgtttcgggaaaaataaaatacataggcagggcgcggtggctcacgcctgtaatcccagcactttgggaggctgaggcgggcagatcacaaggtcaggagatcgagaccatcctggctaacacggtgaaacccagtctctactaaaaatacaaaaaaaaattagccgggcgtggtggcggacgcctgtagtcccagctactcgggaggcagaggcaggagaatggcgtgaacccaggagacggagcttgcagtgagctgagatggcgctactgcactccagcctgggcgacagagcaagactccatctcaaaaaataaaataaaatacataaacaaataaattgcagcttcattcaatctgcccagttacagaagtggaaagaagctgaaggatcctccccgtttctagagctgcaccgcatggcacaggaagcagtggccacaggtgtctgttcaagttcaaactgacagcaatcagcttgaattccgaatctggttcttgttatattctccacatttcaagggctcagaagccgtatgtggccagtggctcctgcactggacagcccagaagagaccattccattcctgcagacaaaactagtcgcagcaccctgctattctagacagaaagcactcaatttcaaaaaccttcaaactcagagacttctagtggagatttccctaaatacctatttcacacagtttacggtttattttacagtttctcatttgtttttttgttttatttattttttttgagaaggactctcgctcccatcccccaggctggagtgcagtggtgagatctcgactcactgtaacctctggctcctgggttcaagtgattctcctgcctcagcctcccgagtagctgggattacaggtgcccagcatcacacccggctaatttttgtatttttagtagagatggggtttcaccatgttggccaagctggtcttgaactactgacctcaagtgatccacttgccttgtcctctcaagtgctgggattacaggcatgagccactgggcccggcctatcgtttgcatttcaaacagcatgggtataaaatagcctagtaattacactgcatagccacagtcatccccgtggaagagaatcacatgtgtcccttataaaaatacctagatttctggtctcctttgtaaacaacctggacacactcaactcttgggaagttcctctgctcacctgaaagtcaccggggagattttccccatgagggcgtacgccgtgacgctctgaaggtggaacaggactccgtctgtcagaagcagcagcaccacgtcctggttgtagctgaagctcttcccgctcctcccgatcactgggacgtcctatgtggcaaacaaaagggtactctattggtttccattttccatttactaatcatccaccacgaacacccagcgccactcctgcccagaaactgggtaaagctgctgccactgaggacagccctgaaaatgcctcgaggggacagctgaactgtgcactcatccattttctgttttttgtttgtttttattattttttgcactaattaattttcaccatgcagatgcaaatggacaacaagcacatgaaaaaggctgaacatcaccatcatcaggaaaatgcaacagaaaccccaatgcggggccgggcgtggccagtctggccaacacggtaaaacctcgtctctactaaaaacataaaaactaaccaggcatggtggtgggcgcctgtaatcccagctactcaggaggctgaggcaggacaatcacttgaacccggaggcggaggttgcagtcagctgagatggcaccactgtaccccagcctgggcgacaagacagagacttctctgggctgccagaggctccggaagccgggtgcctcaggccgtggcagttccgtcactctccaacgcctcccccacagacttctttttgctaaatggtatcaagattttctcgttgttgtcagcaagagagttggttttctaacatctcatcgaccatggctggaggtcaaatcgatgttttaaacttgctggaaataaacggttcctttcttgcatggctcgatgagcaataaggttcctctgtgtcattttgtttacgatttttaggattgctttttaaagccggacacggcggctgatggctgtaatcccagcactttaggaggccgaggcaggaggatcacttgagataaggagttcaggaccagcatgggcaacacagcgagaccccatctctatagaaaacacaaaaatgaggctgggggtgctcatacacgcactgagggttgaccctggtgttcttgccttcttagattcttctggagctggagatgaactcggacctcaaggcccagctcagggaactgattattacagcagcgagggaaactgaagttggtggtggtgagaaagttatcatgggcaggtacagcagctcacgcctggaatcccagcactgtggggagctgaggcgggaagatcacgaggtcaggagctcaagaccagcgtggccaacatggtgaaaccccgtctctactaaaaatacaaaaattagctgggtgtggtggcacgtgcctgtaatcccagctactcagggggccgaagcaggagaatcgcttgaacccgggaggcagaggctgcagtgagccaagattgcgccactgcactccagcctgggcaacaaagcgagactccatctcaaaaaaaaagagggccggctgtggtggctaacacctgtaatcccagcactttgggaggctgaggcgggcggatcaacgaggtcaggagatcgagaccatcctggctaacacaatgaaacccagtctctactaaaaatacaaaaaattagccggatgtggtggtgggcgcctgtagtcccaactactcaggaggctgaagcaggagaatggcgagaacccgggagatggagcttgcagtgagccgagatcgcaccactgcactccagcccgggcgagagagcaagactccgtctcaaaaaaagaaaaaaagaaaaaggccaggcgcaatggctcacgtctgtaatcccagcacttagggaggccaaggcgggcagatcacttgaggtcaggagttcgagagcagcctggccaacagggtgaaaccctgtctctactaaaatacaacagaattagctgggtgtggtggcagacagctgtagtgccagctacttgggagtctgaggcaggagaatcgtttgcacctgggaggcagaggttgcagtgagccaatactgagccactgaactccagcctgggcgacaaggcgacactctgtctcaaaaaaaaaaaaaaaaaagaaagaaagaaagaaaaaaaaaaaaaaggaagttatcataatctttgttcttcttctgccactgaaataattccagaacatccaagtctggctagtacgtgaattggagaaaaagttcactggtaagtatgtcgtctattgcttagaggaaaattctgcctaaaccaactcaaaaaaggtgtacaaaaaataagcaaaagcgtcccaggatccacgctccgacagctgcgcacgtcgcaatcctcgaggactcggtcttcccaggtgaaattgtgggcaggagaatccgcgtgaaatggacacagcagctcacaagggttcattcggacaaagcccagcagaacaacgtggaacgcaaggtccaaactttttctggtatcgataagaagctcacagccaaggctgttaattctgaatccccagagttcccagtttcaattgttaagaaaaatgactaacgtatactcacagtgaaaaaacaaaaagacacacaaaatacaaaaattagctgggcatggtggcacatgcctgaggtcccagctacccaacaggctgaggtgggaggattgcctaagcctgggaggccgaggttgcagtgagtcgtgacctcgccactgcactgcagcctgggcgacagagcaagaccctgtctcaaaaacataaaaaaaacaaaagaaaaaaaacaaaaaaaaaccagagttgacttttaggctttgattttgttataatcacctaaacgtgtgtgcgggtctcaagtgcatgtggggcaagcccaaccccatcctggaccctcggcctcctcccgtccccaaaggcagacagacacttccctcggccttaagatcttgtcgtttcttaaataagcgaacacgtgtgcacccccacactccgttcaagatgccgcgctctgtgggcgcctctgctcctcgctggttttcatgcagccacactgggtacgcgacatggggctgacatgtcactggaaatcgcctgtgagtcattaagaggtgggagaggcaggagcctgggttgcagctgaggtcaggggctggggcccaggacaggcctgtggtggcgggtgctggggaggctgtggggtgctggcacaggagggcccacggaccaggggccacggccgcctgtatggtgctggccgaaggcggcccccgcccgtcctcttcggatcagtgattggcacctgcagtaatcttgcttgccaggaatctgcccagcccccacctgtctccccacccagttagggccacgagacacaaccctgccctgacctccgcatgccagtgtgagaacacctggcagacgccaggctccaagacacccccgcacatgtgaccgtgagagaagtgaaggcactgccagtgtgggcaccactctgagtggtcctcgcggcagagccccatggcaggcagcagagacgggcaccacggatggaggcctgggatggtggggcgcaggcggaggggtggggcccagggggcctcacctgtgtactcccccagaatcatccgagacatgatcaccgtgaagatgggggcggagctcttcaccgtctcagcaaacgaaaccgccacatttttcaggctgaccaaacccaaaaccacagttgcaaacctaaaaatgagccaaaagcaccatcaccttagaacgagtctgtctgcctgcacccaccgggcaggctctccaaggggctcgctcgctcggttggcacgtcggcccctctccgcccacctcctcatcaccaacatggtgcctggacccgcttctgtgacgctttaggtcgagcccccaggaaacggcactgcgtccaatgggaagtgacttctgccaccccttgaaaacgtcccagagacaaggaggcaccctgtcctgagaccaccagcccggaaagaagctgactgaacacacgtggcagtgagagccacgaagccacattcatttggtgtcctgaaatctggacagccctggtgcttttataaagtctgcactgaaaactcaccagccagcagagtccccgctctagtaacgagagggactttacatttaaagaaaaagagacactcaaccaaaaccaggagattctttacctcatcagacccacaaacagcatcgtcataaggaagttgggtgggtaggaaagccgggccttgtgctgatataaacagcaaggaacgagggttttcacacacccgataaccgtggtggacagcatctgcaccgcacctgcgggagggagggggccgaagacaagagggagaatcacccctcccgtgcctgcagtgggctccacccccggtctcccatcctgacctgggctcccccggccctcccgggtggttgctggctgctccctgtggggtggcaggtggccggcttccaccctgcccgagccgccgcctacctagcatgctgggctcgcctcccagcagggacaggatgtacttgttgaggaagagcgtgcagaagctgaagaagaaccacagcgtgaggtagagcagcgcccgcgagctccacacacccaagtctgactcgatgaccgtggtctccgtgatggtgacggtcagtacgttctcatctgtgccgccgtcgctcttggcaaaaacaatcttctcacttcggtgaccaaacagagagccccagctgagaggcgacctgcctttcggcttctcttcggagccaggaaccagctcttccagtgctggggttttcaccgaggacgacatgctgaagccacagccacgaacgattttacctccaggctgggcagcatgggtcaccgtgaccgcccgggggtggggccgcagcagggactccgggcgccaggaacgaggccaccagggcctctcccaggcaaagcgtagaagcagacgctaaaatattaagaaaaggaaacacatcacccgttttgaacatttaatgtcctcaaaggtttcaaccaccaatttaaaatcactttgaaaatgcaattgggccgggcacggtggctcacacctgtaatcccagcactttgggaggccgaggcaggtggatcaccttaggtcaggagttcgagaccaccctggccaacatgacgaaaccccgtctctactaaaaatataaaaactagcagggcatggtggccggcgcctgtaatcccagctactcgggaggctgaggcagaagaattgcttgaacccaggagacggaggttgcagtgagccgacatgataccactgcactccagcctcagtgacagagtgagactctgtctcaagaaaagaaaaaaagaaaatgcaatcgttcactgtccaaagatttttagcaattgaatcccgtttttctctgcgcgtgttggcggatccttgctcttgagagacggtctcctggcacacttgactgtcgtcctggcagacctggggctgtgggtccttcacgccctgcctggcagctgcaccttctcgatgggctttgtggctgccgctgccgggtgcccaggactaattccatgctactttctttttttttgagacgggagtctcgctgtgtcgcctagcctgaagtacagtggcgcgatctcggctcactgcaagctccgcctcgcgggttctcgccaatctcctgcctcaggctcctgagtagctgggactacaggtgcccgtcaccacgcccggctaattttttgtatttttagtagagacggggtttcacagtgctagccaggatgatctcgatctcctgacctcatgatccgacctccttggactcccaaagtgctgggattacaggcgtgagcctccgtgcctggtcttttatttttttgagacagagtctctgtcgcccaggctggagtgcaatggcgcaatctcagctcactgcaacctctacctcccgggttcaagtgattctcctgcctcagcctcctgagtagctgggattacaggcacccgccaccatgcccagtgaatttttgtatttttatttcattttttagatggagtttcactcttgttgcccaggctgcagtgcaatggcacgatcttggctcaccacaacctccgcctcccaggttcaagcgattctcctgcctcagcctcccaggtagtggggattacatgcacgtgccaccaaaccctgctgattttgtatttttagtagagacgggttttcgccatgttggccaggctggtctcgaactcctgacctcgtgatctgcccacctcggcttcccaaagtgctgggatttacaggcatcagccactgtgcccagcctcccttttcttttttttttttggctgactcatgggttagaattctggattgggcaaacacataaacattttgtacatgacgagagccagatttcatcatgtgagtgaagcgagatgcaaacacgaaaggaagtccttcaaggcagccttgtagtgaaaaaataaaaataaaaatgaaaaaaagaggctgggcacggtgactcacgcctgtgatcccagcacttcgggaggctgaggtgggcggatcacaaggtcaggacatcgagatcctcctggccaacacagtcaaaccccatttctactacaaaaaattagccgggcatgatggcgcgtgcctgtaatcccagctactcaggaggctgagccaggagaatcgcttgaacccaggaggcggaggctgcagtgagcagagatcgcgccattgcactccagcctgggcggcagagcgaaactctgtcccagaaaaaaataaagcttagaaacaagaggctatgtagtctcgagatagatccagccctatgaggcacatgtcaatcacagagggaaagctatgcacgcacaaagcatgtgtgaatcagagagaaagctatgcacgcacgatgagtagaagacaaacacgtcctgcaaggagacggaggcgcagggagggggtggcagccgtcctcccaagacatgaggacttctagttcagtctgagaccttggtgcagggctgggcgagtaaacaaatgcaaaagaataaggacctcgaggtcgggcgcggtggctcaagcctgtaatcccagcactttgggaggccgaggtgggcgcatcacgaggtcaggagattgagaccatcctggctaacacagtgaaaccccgtctctaccaaaaatacaaaaaaattagctgggcgtggtggcgggcacctgtagtcccagctactcgggacgctgaggctgagacaggagaatggcgtgaacccaggaggcggagctttcagtgagccaacatcgcgcctttgcactccaccctgggcgactgagcaagaccctctctcaaaaaaaaaaaaaaaaaagcaaaacagaataaacatacgtaggccaggtgcagtagctcacgcctgtaatcccagcactttgggaggcagaggcgggcgtatcacctgaggtcaggagtttgagaccagccttgccaagatggcgaaatcctactaaatacaaaaattagctggacatggtggtgggtgccagtagtcctaagtacacaggaggctgaggcacgaggatcgcttgaacctgggagacggaggctttagtaagctgagattgcaccactgcactccaacctgggtgacagagcgagactgtcttaaaaaaaaaaaaaaaaacaaacaggtctggtgtacgcagaatggaggcaccacgaattgctgaagaaggaaactttattcagtctatgataccaggacagttgtccatgctgccaggcaaaaagaaaaactggattctgatctcattatcagtagacaaacagcgacaattagtaacactgacacagccctgactgtgctgctggagggtccgaagcactctctgcacagcggtgaatccgcacaacagccctctggggaaggtgctgttatcacccacgtgagacacacgaaggaaagacacggcttcgcagcagcagcgtcatgattcgaacccaggcggcctgctcttatgataaacttaaatgtgtaaaactttatgctcaggaaaatataagagaatgtcttcctgaccctttttggggtaggacaataatttctctaaccaaaccccaaaagcatgacccattaaaaaaagggtcaggtggactaacttggctaaatgaagaattctgtttcaccaaagtacactacaaagtgggccaggcgcagtggctcatgcctgtaatcctagcactttgggaggccaaggtgggcggatcacttgaggtcgggagctcgagaccagcctgaccaacatggtgaaaccctgtttctactaaaaatacaaaaattaaccaggtgtggtggtatgcacctataatcctggctacttgggaggctgaggcaggagaattgcttgaacccaggacggggaggttgcagtgagcccagactgcgccgctgcactccagcctgggcaacagggcgagactctgtcttaagaaaaaaaaaggccagacttgtctcacgcctgtaatcccagcactttgggaggctgaggtgggcggatcacccgaggttgagagttccagatcagtctgaccaacgtggagaaaccccatctctactaaaaatacaaaattagccaggcatggtggcacatgcctttaaccccagctgctcaggaggctgaggcaggagaatcacttgaacaggggaggcagaggttgtggtaagccaagattgtgccattgcactccagcctgggcaacaagagcaaaactctgtctcaaaaaaaaaaaagaaaaaaaatatatatatatatatacatatacacacacacacacataccacaaagtgaaatgaacagccacaacctggcaaaagatacttgcaacatgacaaaggattaataaccagaaagtataaagaattcctacaaaccaattagaaaaacaggcaaaaaaaaaaaaatattggcggggcatggtggctcatgcttgtaatcccagcactttgggaggccaaggcgggcagatcacctgaggtcaggagttcgagaccagcctggccaacatgatgaaactccgtctctaccaaaaatacaaaaattagccaggcgtggtggcaggcgcctgtaatcccagccacgcaggaggctgaggcagcagaatcacttgaacctgggaggcggaggttgcagtgagctgagactgcgcctgctccagcctgggtgacacagcaagactccgtctcaaaaagaaaagaaaaaaaaaaaacaaaacaacatatttcacagagaagaatttatgtttttggagaaggagtttcgctcctgtcgcccaggctggagtgcagtggtgagatatcagctcactgcaacctcaacctcccaggttcaagcgattcacagaggacaatttctaaaaggcaaataagaagcaggaagggtgcatgctccttctctactgccctgtaacagtcattccacacttaccacctcaaaacaacaaatgcttttgatgttggctcctgtggggcagcaatctgcgggaagcttagccaggcacctctggcttaaggtccctcctgaagctgcagtcacaccatggaccagggctgtgacctcatccgaaggctcaactggggctgaggcccacctctgagctcactcaggtggacgctggctgggttcagttccttgctggctataggtggaaagggcccccaccagtttcttgccagcttctccacaggacgccccacagcctgacaggagctttcatccagcaagctcatcagggagtgggagagagcagccaggacaggagcccaggcctttctgaacctcatctcagaagtgacatccttcccttctgctgtctgggcacagctccccgggtggagcccgaggactagaaggaaaagaaaacttggatttaaaatgggataaagccataggagctgctcgtcccaccacaggaatctcaacgccgggttactgacaaagcgtcactttgcacctcgtccaactgtgcagacctctcctagccaggcccctgcaccagaggttaagaatccgtgcccctggtcaggaagtccaggtgggttcaaacggccagcagggaatttcaggcaaaatgtgtcccaaatcttcaaaccacgccccagaactcagacctccccctgggagttcgtcccaaggaaaccacctgcaagaggctcaggctgcaggggacactccgcttccaaaacccggaagctggagaccacacaagtgcccaacgccaaaggcaccccgtggagggacgccctgtgccctcccccgaccaggtgacccgctgcgccctacacatcttcaccaggaaacatctgttatcgatgtggacgaagcgcagcctgcactcccagatccgctcattttcgttctgccctccgttttacgattcgcctacactgaaaatgcgtgagtggagtggaaagccttcctactcctgcctcagcgaccccttctaaaatactgcctcgtttggcctgaaaatgtgatttgcaggcttcctgagcaaagtagatttcactccattaaagaaaaaaaaaaagaaaaggcaccgaacggggctcggctgtcgggagttttgctttagttttttgcgtgttttgttttgtgtttttttgttgttgttgttctttttgcggccacgcacaccgcgttcccaggcttcagggcgtgggggtcgccgtggactcccggacgtgaaaacgcttaaagccagctgggaaaaccccaccagcgttttccgcgcacagcgccagccataggaaaggacccccaggagcgaatccgggcagggaaaccccggacgcccgcacactcagcatcagtaccggcacccagcacccagcaccgagcaccgagcacgcagcaccaagcaccgatcaccgagcagagcaccccgcacgcagaacccaccgagagcctgatgcagtctccgccgcaggcatagcgctaggccccggcgccttcacaacaaagggacgctggcgggcggggcctaagaggtgcgcggtggaggggccgggcgcgaggccgcggagacagctcggagctcggcactggggagtggcacagcgctggcggatccaggtgggcttcacggggcgcccgcgggaccggaaatgacgcgcagaaccctgcatcgggctcctcgctgccccgcgggcgccgctcctcagtgccccagagccacggagccggggaaacgcgccgcggcccacaacgcccccgcggctgcccgttggttccgcccgagccgttctactccaggcagacgggaggagaaacacggcgcgctcagcgtcccctgccccgttggttctgctcgggcccttccactgcaggccgacgggggtggaaacacgcagttttttttttttttttttttaaggtctagggtaacacggggcttttaagtgcctctccgcggccgcctggtggtccagcccgggccgctgcagtgcagccacacggggagggacacggcgcgccgagtgctccgggcggccgcacgttggttccgcccgggccgttccactgcaggcagagggagaggacgacggtgcgcgtagtgcatccccgtggcccgttggttccgccggggccgttccactgaaggcagaaggggggggaaccgtggccccaccccccgcggcagcccgttggttccgcccgggctgttccaccagcggcacttcagggcgggatcggccagtctgtggaggcagcggcctctaagccccggagggtttactgcccaggtttgggttccaggaataagaaatccactgaataggcttaacttagaagacacaaaggcgcctcctggcggaagtggccacgctccgcccagcctgagggaaagctgctctgacagctgggcccggagctgcggggggcggggccgccgcgcggggtgaggactcgcctcagggcgctgattggctggtggcgcgctccggggcggggccttcgtatccaggctggcgtcggggctgccgcgggacatccggagcagacacccgcgggcgcgcctgcggccccgaggacccccggctccggagcttcgtcgagcgttttcctagcgttactttcccaaataattttcaggaatgaagttacggctaaagggctctttagagattacttttgggccgggcccggtggctcacgcctgtaatctcaacactttgggaggccgaggccggcgcatcacgaggtcaggagcttgagaccagcctggtatggccaacgtggtaaaacgtcgtctctactaaaaatacaaaaattggccgggcgtggtggcgggcgcctgtaatcccagctactccggaggctgaggaaggaggatcacctgaacccgggaggcggaggttgcagtgagccgagatggcgccactgcactccagcctggcgacagagtgagactccgtcaaaaaaaaaaaaaaaggaagaaagaaaattataaaatgaagtgaaattaacgcagtggagtgccacctgcctgctgcctgagttcactatccacacggagttcataaatttgagagcagtttacaaagtagattctcctactttccaggaaacccagaaatgtctggtgatttgcccaacagtctcagctgttgtggtcagcagggccgctgtggtatccaaatgatttcaaaagcagatttataaaaagtactccttgtttttttttgagatggaatttcgctctcatcgcccaggttggagtgcagtggcacgatctcagctcactgcaacctccgcctcccgggttcaagtgattctcctgcctcagcctcctgagtagctgggattacagatgtgtgccctcacgcccagctaatttttatatttttagtagagacagggtttcaccatattggccaagatgttctccatctcctgaccttgtgatctgcccgcttcagcctcccaaagtgctgggattacaggcgtgagctaccccacgcccggcctttatttttttttgagacggagtctcactctgtcgcccaggctggagtgcagtggcgcgatctcggctcactgcaagctccacctcccaggttcaagagattcttctgcctcagcctcccgaggagttgggatcacaggcacccgccaccatgcccagctaattgttttgtatttttagtagagacggggtttcaccgttgttagccaggatgctcttgaactcctgacctcatgatccacccaccttggcctcccaaagtgctgggattacaggtgtgagccaccacgcctggcctctcaaagtttttatagcaaagccttacatttcatgaggaaccatgcattttattttatttttgagatgggggatctcgctactttgcccaggctgggctcaaactcagggctctctggcctcagcctcccgagtagctgggtctgcaggtggctgtcaccgtgctgggcctggggtgtgcgtattaatgattttggaatagtgtctggaagcctgtgtgccttcctctcttcctctccccagaaggacctcccacctcgtcctcccaaagtgttgggattacaggtgtgagccaccatgtcccctctctttgctattttgcctgggaggagtgtattaataattttaattttaaatttctttgattatgttctagtttgattattgatcatttacttcttagctatttatattcttccttgagtcatcggtttctgccctttgacaatttttctgtgaatgttttgtgttgattatatgagctttgactgtattgagaacatccacgcattgtattattgcaactgttttcctagttgagaacatcgacctgctgtattattgcaaatgttttcctgcttgcatgtagtcatttgttatgcatattaatgaatttctatccacatgacgtggagtcagttaggaatcagttaggacgccctcgctgtgtgggagactgatgggtccaggcgctgtgcaaaccccgcctccaaagtgcatccttggctcactgggaccttccgggttgtgctgctcttgcttcacagcctctctgggtctccctgccgtctgctgacctcggggcagggtctacccaggctgagcggcccatgggctgtgggattcctttcctctgccttcaggtcctggatgatgtagaaggcaggaaggaaagcagtcatggctagctctgtcctgcccccttcggggtcccccccggcccacaggctcctccttgtcccccagccagcctcagtctgggtctgggctcccgctggggaggagggtgagacctgccggcccaaaggagctgaagtttcccaaggggcgttgaggacagcagggaagtgtggggtgtgaactgaggccccagagaagggtctgtgccaaggccccatgggtggggaggaagaaggaagcgtccccacctggagacccagcctgcaggccactcggccacctgcgcagaagtaggggagcagcagccgctcatgcccctgcagtttgtcctcatcagcaggtggggaaactgaggccggggagttctccaggccaaggtcactcacgggcaagttcccgcagcctttggaccctccatacacgtcagggccgctcatgctttcctgggcccttcactggtttggaggaagcttcctgttgcccagagcgcactgcctgtctctgagtgtatgtgtctcagtggcgtccatgtgtatttttctctgtgtgtatctgtgtgagtctgtgtgtgtggtgtgtttgtgtctgagtgtgtggtgttagcgtgtctcagtggcgtccatgcatatttttctgtgtggtgtgtctgtttgtgtgtgtgtgaatctacgtgggtgtttgtccatctttttgtctggcctcctgtcccctctgcacagagcagctgggtggggatgctggtcctgggggcttgtcagcaggatgtgggcgtggggcagccctgggtgaggcctgagtacaggccccaggtgcctcctgcacaggggtggctgagccagctcctctgtggctcccgggtccccaccgccggtcactgggcaccacctgtcctggccacccactcctgcccaccctgctctccgcaggggcctccttcctctttcagctgtgcgccctggttgtggaggctcctaaggaggttgtggcctcggtttaccacctgccttggctccttggtgttgccagaccctgaaggcagcccatgccctggctgagatccttctggggcgggatgtgctggaagcagctgaaccacgtggtgatgtaccagctcctgctgtcccctacatccccagcaccgccagccttccctgggctcctccggccggctcctctaccctgtacccgccccaccctgctaccaccccccaaccagacttccagctccaggcagggtcgcagcctcctgggctcccagcaggacaggcctcacccagaccccgcaggagccatgggacttgggctgggtctttgggcctggctgcagcccctttggacctgacctgaggagacaccctggctgtgggaggcagggtgggggtgccgggcccagcacagaggtgcccagggtgcaggctggcactggcccggcagggaccgtggatgccgccgtttcaggctcgaaaaggtttccatgccccagagcctgagcccggcagcccccgaggatgtcttggggactctgtgctccccaaagccgagaaggttaggcttgacccacagcctcttccaggccggggaggcagaggcgctccaggtcggtagggcggggcccacagcccagggtttcacgtccccaaaacggggcagggtgctggaggcgcaggtgtccacagggtggtcgttttggtctctcctggacttgcacgcgtgtagtgcagactggctgccggcaaagccctgagccacattcatctgggccttgttaggacaacagggacggtgcggggtgggggggttgcggggcgcaggaccacgtcagtggagggagggaggccgatatcggtgcccaggctgggcccaggggccagcgggtcctcacctggcttgtggctgcccctgttaggcagcccggatggaggggctcttccagccctgctggccccgggaatgcagggactcaattccccctggtctcagtggctcttccgggagcaacacagcctgcccgagtcgacaccacccctcgggtttgagtcccttctgtctacccctacccccgccagggcactgcccccttgcccggaagaggcagcggcacccccagccccttggggaggatgccctgccggccccacactcggtggatgggcattttggggctaggatttaatgggggtgaccctgcccgacccctctatgttggttccacggcgtcagaagaaagctgttattaacccagcttattttctacaagtcttgtttattgaaaggatctgaaaagcgtaataaggctttcaatgacatttaatacattttcaagaaattaatatgaaacattaaaatttacttcaaaaatccaaagttttctagatcattcccatctcacgctgctttagaggtcagttcacaccttctgtgttcagatgagcggctggaattctgaacactgccgtcttccagccctaacgctgggcgctggtccctctctcctaagcccacggctgggcttcccctgtgcccagggtcatggcggacttcaagccaggccggctgcccagaatcacactcagggtttttggacgctcaagtccacagatgctgaggtgcccagacgagggtgagcagggagacacatgcctcggagaacgtgcccaggctgggccaggcggctgcgggaagctcctcacgggcagaggagaacgtcttgtgccttccttatcgatctccagcagatgagggcaacttcgtgtgcaaaactcagagagcagttactcaaaaaaaagacacccgggcagcagtaaccaggacaccagggtccgaccacggcctccacacacctgtgcccgtggaagacgcgggcgccggggtaggcagcatccacgtgctccacagctgccggtgctgggcaggctggagactcacgggagaggcaggaggagaatcagcgtgttgagtccctcgctgtgttagtgtgaaaaattctcattacagttgcaaataaaagggatcacgatcactagccccggaaaccctcatctcccggaccatcaggatcgcactgaacagaatggtcccctaatggtccctgaggacagcgtcttgcagaacataaatgtaaacattgaatggcagacgactcccttccccttgaaatcttcacaaaagtgtgtacgagaaagtatgtacatcagcacttcagaaagtttaaaagagtctctaaaaagtatatacaggatttaaactaccttcctgggagcagaagctacgtgaggaatgtgtgggtcgctggcgatgccagcccccttcccgctgagtgtcccagactcagtgctggcctcaagcggggagggctggatggcaggggacgcatccaaccctctccagaaactgagcagaacaaaaccgccttgccagccactggcaagaccatgctttcaatggcgcctccgccaggggcttccctgcagaagttttaggggaagaggtgcaggtcaaggggaaaagcatggcagctcaaggaaggtttttggctgagacatttattatcaacattgaaggacaggtcgagtcattctgactcctctgaatttcaaccgactgatttgcggaaaaatatcctggcatggaaattgcggcagctggaggccgcgctccagggacccaccgcggggtgtcagcaggacagaagcactcccagcccatttctcacgcttctttagaaatgcaaaaaaagtcagacattttaaaaaaacagctgatctggacaaaaggcagacccaggctctaacccagctacagaaaggaagtggccgtgccactgagacaggcggtcacagacacacgcagattggtctgtccccagagggcgcttggagggcagcggaaggattcgggcctggataggggcttgacctagccctcctcctcctcctcctcctcctcctcgaagtgggcttgcttcttccggacgttccaatgcaggcactgggcgaggctctcaaaccagtcgctcacggggtcccgcacacagatggaggggagcgggtagcatgaggtagtgatgctgatgctgggacgggagagcagcagcctgagccagggcttccagaaaggcccacccccggccaagaacccttcctccctccctccctgggaatggccgggactcttttcctgtggggccgggcagcccctccccgaggcaggcttgagcagtgccccatgggtgctgggacagagccatcccaggtcctggaggggacggtgcagggaactgacaaactctgccccagggccctcaggggtgaggtcccaggaggtgggtgggggtgggcagcagtgccaggggggacaccctcaggcctctgctggggccaggcctgcatgtgccaccgtatgcgacccgctgcccccaggacgggtgccccgactgtgatgctgcaagacccagggactcaggccctgtggtgccctaggggacaagctgtgtctacaggccaaccgcaagagggcaggcgctgcctggcccggggaggaggttggcaggcagcgcccagcccggcatgcagcccacacctgtctccatggcggatctcttgtctcttccgtccatcaaaggacacccatgctgtgttccttgcttcaggtgacagcatgatctgagggtcaagcagggagaggtgtgggcccccagctgtggggaggacgcttctaggcacccacccctgagtgctcgccagaggtcgaaggttgggcagctctgaccctgccttgcggacggtgcagtgcacgtcctacaggcaccggcccagctcagcaccgccagagaccaacaatggcagaaagcccctcagacccgggccctgggcaccttgatggacagaactcgggcaccagcaagggaaggcttgcatctgagggggcacaggatggccctaggatgacgaggccgcgtctgaggctggagccagcatggcagagcggggtgctaggtcccggctttgtgttgcacggggtcaaatgactcacaaaccggaaaaggagtgtcgttggctctgaccttcagctcgacccctgcggggaccacgatgggccggaaggacagcgagtgggggcagatgggcgtgatcatgatggccggcacgttggggtggatcatggaggccccggccgcggccgcatacgccgtgctgcccgtcggggtggacacgatcactcctgacagggacaggcgcaggcgtcactcccgcccgagggacgctcagggccccaggacagtgctgcgggccttaccgtcgccctgcaccgtggtgatgaggtgtccgtccaggtagacatccacattggacaggtaggaggaggggcctctgtcaatcaccacctcattcaggacctggaggggcgacagcattgcacactcagggcgggggatgccgcacggctcgcagacaccctccgtctcacccagccgggctctccggaaggtcctcatccctgggaccgaagtcgccccaccctgggcccctcaccgaggccgaggcgcctccactcacctggtactgcatggcctgcttcccgacatccatgtccaggcctgcagcctgcgagccgttctcacccagcccattgtgcacggccgtcttcttcccccggagctccttcaccaccctgaccttcagccgactccggagaacaacagctgcgttccctgaggtccagcaggagtcagagggcatgcatcagggaagtcagtggggtcaggggccccaccccagggaggccagtgggagtcagagggctctttcttctcccaagttgacacacttctgtgcctttttctttttattttgagatggagtctcactctgtcacccaggctggaatgcagtggtgtgatcttggctcactgcaacctctgcctcccaggttcaagtgattctcctgcctcagcctcccaagtagctggaactacgggtgcgcaccaccacgcccagctaatttttgtatttttagtagagacggggtttcaccgtgttggccaggatggtctcatctcttgacctcgtgatccgcccgcctcgacctcccacagtgctgggatgacaggcgtgagccaccgcgcccggccgacacttctgtgccttctgagagtgagaatcagctcacttctgcccaacacacatggcagcttcaacctgtgatctgctgaaacttctcagtgtcagtaaaaggtttgaaccactcaagatttagaaatccctgaatcttgaaacctttaaatgttgctccatgcatcattaaatgaaaataaaccccccgcaagcaagcgagacagcagcgccatgatcagagctcctgtgggctccagaacattccaactcaccctctatcacctgagtaacttgggactgaaagttctcaaagctgaatggggtcaggaagcccagggagcccaggtggaaggccatgaccggagggacgctgccctgtgagccgacggagaggtcactcagtgcccacgccgtgcacccccgcaccacccagctttccagcagcacctcaggagggacccagctctgtggggacagcaccccgaccctctgcaggagggactggccatgtggacaagcggagggggacgtcgcaggccagggtgggccgggccaccagggccaaggttggtgtggggagctggtgaggaacaaaggtggcagggctgagcggccccctgggcacggagggctgggggagctggcgagggcgggtgggaggcagccttggggtcggagcctcgcgccccacaggtgctaatggggagatggggagaaaagcagggcgggctgcgggcatttccggtgtcaccaacatgcagtgggccaagggcagagccagggtcccccacacagcgtggccctacagccccaggggagagctgtgctgctgagaaaccaggaagaggagctcaagggaggcccagaggggatgggccagtaggcgaggtcgtttcccaggacccaccaccctgcgccactccctgctgtcccaggcgggcgctggccacccccagccgtagcactgtgtccacactgcccctggccccaccgtcgcaccccaccgggctgccaccatgggcctcagtgctggccgctctaggtgactgctctcgtataaaggggtgaaaagcaatggaagccatgcttgtgagcccctcgttacgcagcacctagactagaacctggtgtgggtctggaaatgtcagcgcttcacctggaaaagcgaggaagcgtacagcagcgtcccgtctccccccaggcagatgatgaagtctatctgattggaaatgtcatcataatctaggaaacacaaagcaaaaccaagaagaggctgtcacacagtggcccctctgtggcgcagtgcgcagacaccaatgacaagggcaacagtgccagaagcttccaatggggcggggaactgtgctggagaaaccaaggacagagctgctgacagcccaccttctcgaaaggtacagaatttcttcttcactgccccaaagctttcatcgctggcgatggcagggtcttctagcactttcttttccacatacacgatcatgttctcctggaagcaaagtgccaacctgctcattccacctgcagaccccaccctcctgcagggaggttcccgactcacgggcgctgtggtcagagacctggcatcgtggcctgcatgcccgcccccccacgctcacgctgaaacttcatcaccaacgcgccaggaggaagcaggacctttaagagatgactgggcggagggggctccctctcaggaattgactaaggctgttatttcaggagtggctttcctgggcgccgcaacccccacgcctgctcttctgaagagaagacacagcaggaaggcccacgtcagatgtggccccttgatctcggacttcccggcctccagggccacgagcccaccagctcattgttggtcacccagtctggtgcttgccatggcggcacacacaaacccagacacccggcagatccccactcagtccccagttccagacaagcagccgttgcccagcacttgaggtggttcccatggtctcacggggcggtgatgtggatggaggcccccccaactccatgtgcaccccaggcccccttcccccctgccccgcgtgcctccatgaggtgcgtgcagagctccttgaacggctgcagtaggctggcatctctcatcttcttgatgacaaggacgctctttggggacttgttccacgtcagccgctggctcgcggggtcctgaatgtgcctttaggggaggagaaaagagttcacaccagctgcgatctccctcttgcggaaaaggtgtatgacttagaaaataaaaaaaaaaatctttaaaaaggtgttttcacctcccagggaaacgtgctcggtggccacgggctcacagggcctagggtcgcgccacagagacagggtcaggggtcagtagggtccggagtgaccacctctcacctgcttggcccatcacacgcaggctcaggcccacaacccccacccgggcaccacgctgacccaagtgcacgcaccacagcccttcccagcccccggccacttgcctgcctggctcctcagtgacgctggtggggcagaaatgaccacgaaagcccatggctgggccactctttgcttgatgccctcctcaggcccccacgaaaacccaaaccagttgacatggtgactctgtccctaggatcctctgcacacagtttctggccccacgggagcccaggacccctcaaggacccgcttccccccctgcacacagctcactacctccctgcatgaacggactttaacctcactcactctcacagtaaaaatcacaggtttaaaagtccgtggcagccctgacacagccacccgcgctttgctggctctgaccccgaccactgtgcccggtgtttctccacaggcagggcccaccccggtgggattcccattaccacgttagtcacagaaaacatcccagcccagaaccgggaacacacaccacggagcctgctcctgttcccagaagccaagggagggcgcagcggggctggccaccgtcgtcagcgctcaccgcctatcctcagccccaaaggacaagttcttataccaccgcgccagccagctagttccaagttgcccaatcgagaaagctgctgcctgccatgcctcttcccagcagtgacttccccaggagtgtgaccgtcccactaacacccccagaaccacaacacagacgccgatggcagccacagggccacagaccttagcccatcgcttgtgaccttcggaagctggtcagcactcaccctgtgcaggcattactgggaggcgtggggtcactcatgccatcccctatgagctcagcacctgccgggtcacacatgtggctcgcgaggtagcccctgcctgctgggagccggccagtgtgtccacagcatccaggccacgcttggcgaacacgcggccgccccatcggtatggtcctgactgtgcgcccacactagaagcctaagctcttcatactcaaaactcaaagcaaaacacaattgtgatgagacttggtaaagttgttgtaaaagcaactaagtcaaaagagcttcctacacttataaaaatcaaacaaaacaaaacagtttcctcattggtcacatggtcctcctgcctaatcccttctgaaaaaaagtcctcagttcagcagcaaagaggccacacttcagctccctgctcctaactgagccgggtgggaccaagccctctgttcccgtggcctcagacctggccaagtacccagcctccagcctcgccccagcactgcgccagccaccgctctggcccgcggaaccggctgggccccagggaaggcaccctcaggccacagtcaggtggaagggcgttccctgcctcctagcccgctgcgtcactctgcttggctccggcccaagggcgtgcaggtggctcacggtcctccggcctggtcagccagcaaagcccccgccctgcacacggctccccctgctctccccgccaacagtcaccactgacccagtggcctggcctacacccattccagccctgaggctcagctgagcccagccagagccaccagcagcggcgtcgtacaccggcccaggcacccaccgctgtgtgtgaccacaaaccagcgcctcgacctcttcctgggtcacctgcaaagcaggacaccagcccttgcaggcacgcacggctgtgggtactgcacggagagggcagggggtggcgtgaagcttgcaggcacacacggctgtgggtactgcacggagagggcagggggtggcgtgaagccagcatggccacagcctggcccgcctggccagctcctactgagactgtctcacacatgggtggccacgcacactgtgacacacgggcactcacgcacctccacaacacaggcccaccaattccctggacaacaaaacaggaagcgggtgccctcctcaccaggcgcccccacagggtcttgctctggactatcagggaagacggaagttcagatgcatgggaagccctgcccctccacagcggggatgggaagcgggaggttatgatcccagagacacagagcccagagggggcgtgctcccatgggggtgccgagaaagctgcatgcccctcaaggctgccccacaaacccaccgcttcctcctgcggggctgtctggcctcgggcagctcggggaccactgagtacgccctggtctgagggctgaggcagaacatgcacctgtccggtgaccccgccctggcccgagtgactgacggctggtgaaggcagcagctgagatgcgagtgacaaaggagtggctctgccaggaccaggaagtgcagggagggcaccaggcagcgggggagaggcccggtggggtgccagggacacagcaagcacaggatggcgggacagagccacggcggggccgggagggcagtggagcactctgggtcacccacgtggctgctgtgcagggaagggatggtgaggccgcggcgagtggtcaggagtccacacagcggagggcagccgggcaatagtgcaggggagctgcttggatattttgggatcaaagtgacagaatctgcagatggactggatgagggaaagcaaacaggggtcgggccccccgcctcaggcatttggcagcagtgacaggtcacagacactccgggaaccagtggcactgaaagggctgggcctcaaaagcacaagtgcgagtcacttccatcctaaggggctccgtcagcgtctggagcagcaaggccaacccccgtcctgcctgggacgcacgctgccgcggggcccacactttgcagagcagctcctcggatgactcccccgtggctcctgggacctgaacttcggtgacagcccagggctggggcctccgtccctgctgtgcgcccccagcctccatggcaccggtgcctgtcagcaaagggccatgcagtggccgcccccgtatcacacggccgcattgcgctttctggtcaacagtccccagcagcctgcgcgctggaacactcggcccttccgcatggtcctcccttgcagaaagtgaagcatccatgactccgtgaaggaggaggccctgaagagagcccgttctgcacagaggaagagagcccgttctgcacagaggcctgagagctgaggcaccagtcccagaagcaaaggcttctctggggaagaggcaatgaggatgtctaccaggtgcagaatacgactctcagggctggctgggagctcacttttttctctggagacagtcttgctctgtcgcccaggcggaatgcactttgataatcacagctccctgcaatctcaacctcccaggttcaggtgatcctcccgccccagcctccttggcaactgggactacaggtgtgtgcaacgatgcctgctaatttttgtatttttctgagtctgagtcttgctctgtcgcccaggctggagtgcaatggtgcgatcttcggcttactgcaacatctgcctcccgggttcaagcagttctctgtctcagcctcccaagtagctgggattataggcacgcgccaccatgcttggctaatttttgtacttttagtagagatggggtttcaccatattggccaggctggtcttgaactcctgacctcgtgatccgccccccttggcctcccaaagtgctgggattacaggtgtgagccaccgcagctgaccaatttttgtgttttttgtagggatgggctttcaccatgttgcccgggctggtctcaaactcctgggcccaagtgatctgcctgcttcggactcccacagtgctgggactgcaggtgtgagccactgcgcccagcctggattataattctttacacataaaacacagatatcagatcgatcactgttgcgtttttcccatgacactatgacgggcctccaggcagaatgtgttgacaaactgaaccatcaaatagcaaacgcaacccaccccagaattctcactcactcttaaagaaacaaaaaggcagccctgaggatctcatgtggaagccgccacacccacgggctgtgacccggtctccaggccccggctcgcctgccgtccactttctcaaagccactggaaaagccacagctggggagcccccgctcggatgcctgcactcagggggttcagggaggacgcccatgtggctttttgtttaaatgacctaaacatgtacttctcacatgaagtgctagaatcttcctcaacacagcgatcccacaactccacacacatcccgaggactcccccatcccatggcccccggcactcacatgatggtctaggggttctctcccttccaagaaccccccgtcctggggccccagcactcacatgatggtctgggggttctgcagcacacaggcctttggtccaaaagtggtcaccgggcatggcccatgaagagagcgtgtcctcctgtggggagagggcagtgtcagagccaccagggcctgaaaccagacatgcagtgacagacacagatacagaggaggttacacggtaaggcatacatgcaatttgaaagatgccaactccatctgcccagcagccacacaatagcccttggaaggttctgcccaggtccatggctgcactggagcggcacctgtgaggagcacgcatgcccacgcgccgctcagatcatgacccaagccggggagagcttcagcccaaacaaggaaaatgccagggccagggccagcctgggatcagaattcctcagtgtctccaggacccctctctagatctgcatttgggactcaaaacctgagacaacatctcatctctaaatcgtctagattaaaattctagcacaaatgttcactctgaactcatgtcaataaaaaagacgtaggccgggcgcagtggctcacacttgtaatctcagcacttcaggaggctgaggtgggtggatcacgtgaggtcaggagtttgagaccagcctggccaacatggtgaaacccccatccttactaaaaaaagaaaaattagccaggcctggtggcgtgtgcctgcagtccgagctactcaggaggctgaggcaagagaactgcttgaacccaggaggtggtggttgcagtgagccgagatcgagccactgtactccagcctggctgaaaaaagtgaaactctgtctcaaaatgaatgaatgaatgaatgaatgaatgaatgaataaaagacgccagatgaacggctcaacaactttcctagtgatttaaacatggccaggtcacagttaaatcacccagccaggggctgtggcagccgcacgcgtcctggggagaatgctgtcaggaccgctgtgctcctcagggtccagcactgaggctgccctcgtcctaggtgcccgggagcctcccagtcccttcacaaactcagaaaacttgcacacagctggccaggcaacggcccaacaaaatcctcaagtcccaatgcagaagaacggccttccgctgcctcgcagggccagacaaccccaggagagccgtggtgccctgagggctgctccacaggtgacacaggcgtggccatcagtggtcacggacttgtttacctcagccttttaaaaattggtaagtacaggccgggtgcagtgactcacgcctgtaatcccagcactttgggaggccaaggcaggcggatcacgaggcaggagattgagaccatcctggctaacacggtgaaaccctgtctctacacaaaaatacaaaaaattagccgggcgttgtggctcacgcctgtaatcccagcactttgggaggctgaggtgggcggatcacctcaagtcaggtgttcgagaccagcctggccaacatggtgaaatcccatctctactaaaaatacaaaaattagacaggcgtggtggcatatgcctgtaatcccagctactcaggaggctgaggcaggagaatcacttgaactcgggaggcagagcttgcagtgagcctagatcacaccactgcactccagcctgggcgacagagcaagactccatctcaaaaaaaaaaaaaaaaagaagaagaaaacgaagtacattacaaaagaattttacttacttacgaactgaaaagattattgcggaaaacaatgtttctcgaagtgggtgttgggatttaatgtttccttcccaaggacaggctatgcttgggcgtatttggctacctcctcccccacctcaccctgaaggcgcctgtcactcactatggaggcgacctctgacccagggctgctgtcatcaggttcagaatgcaacagaaatggtgcattatgccaaagaacccacaggaaaaaaaaataaaaccccaaagcaattctgttcacgcagtcactgcgctggggtggcctggaggtacaggacaacgacccccactgacaacgaggcaacgaggcatctgagaaaggctgagtggtgacgtggtgcctgcgggatgaaggcagccaccagcgctcgtagcctcctggctcaggcagcgactctgtagacagaaaacgtgggagtagcctgtttctccacggctgccaccacgtcagaggcgctacaggctctcccatctcactgggtaagacaacatgctttctaagactacttttcaccaaaaagccccccttgcatttgatagtcgtgatccttgttaggcagcgccggctctggcaagcttccacctaaaactcaccacatttaccatcaccagaaccgagagcaccatccccaggcaccatcacagctgtgcttgtgcggccaccgtcatgcaaagcccggggcgctgttgcccaagcagcattgtgcaagggtgagcgctgtgggcactcttggcacaggagggagccacttgcccaacatgtgagagggctgggcccgcccaaggccacgctcataactctgcctccaccagccctgctcacagtgcagaaccccccagccttcgcctctcaaaacaagcagagccaagagggatgtcccctcacaccccagtgacttctgtagagcaaatgtttccaggccaggcacagtggcttgcaccggtaatcccagcactttgggaggctgagacgggcagatcacctgacgtcaggggttcaagaccagcctggccaacatggtgaaaccccgtctctacaaaaatacaaaaattagccgggcatggtggtgcacgcctgtaatcccagcttcttgggaggatgaggcaggagaatcacttgaacctgggaggcggaggttgcagtgagccaagattgcgccactgcactccagcttgggggacagagcgagactcagtctcaaaaaaaagtttcctctccaagtgcgcttcagtctaacatcaagggtcagcgtaggcgccagttagatggttctgtgctgatacagacagatagagaaacacggtggcaccctgtgcctgtgctggcacctgggaacgtgcgccaggcaggtgtccatgggccaggatcccccttcaagggcacagcttcacctgggcaaggacccagcctcaccttccggatgcatcgacgcagactactcaggagaattcttcataatcgttttaagaaagaatattatgaaatcagacgagaaaaaaaagaggaaccatccctcccagttgtacctgaactccttggtgctccccagggcgggcgaggcagacaggctgcgagacttggcccggccccggatggggtggttgtaactccaggtctcatcgccgtggcaggccgagcagcagtaagcagccgcgtctggactcaattccttattcatggtcattttttcttgttccatttccattgtcaggaaatgagaacttcggtcagaaaaacactgatgccttaatttaataaaataaataatgtaaataaagtaaataaatatgtatgaaacaataataatttacacatacatatgttccatttcatcaaggggaaaaaatggctgaagtccaatttaccaaagtactttgaaaacagactgtttccattgcaaagatatttaagaactactctaggtttttggctgggtgccgtggctcacgcctgtcatcccagcactttgggaggtagaggcgggcagatcacttgaggccaggagttcgaaaccagcctcgcctgaccaatatggtgaaatcccgtctctactaaaaatacaaaaattagctgtggtgggcgcctgtagtcctagctactcggtagactgaggcaggagaatcgcttgaacccaggaggtggaggctgcagtaagtcgagatcatgccattgcactccagcctgggtgactagagtgaaacttcatctcaaaattttttctgtaaaataatattaacaaaaaaaattgtttcaaaaaagaacaaaatagaaagtcacactgtgtggccaggtgtggtggctcatgcctgtaatcccagcactttgggaggctggagagaaaggatcagttgaggccaggggttcaagaccactctgggcaacaaagaactcttctctagcaaaaaaaaaattagccgggcatggtagcccatgagcgagaccctgtcttaagaaaagaaagactctggccaggtgcggtggctcacctgaggtcgggagtttgagaccagcctgaccaacatggagaaacccccatctctattaaaattacaaaattagctgggcgtggttgcgcatgtctgtaatcccagctacttgggaggttgaggcaggagaatcgcttgaacccgggaagcggaggttgtggtgagctgagattgtgccactgcactccagcctgggcaacaagaacgaaagaaactccgtctcaaaaaaaaaaaaaaaaaaaaaaaaaaaaaaaaaaaaaaaagacaggctcttttctcgtaaacaatacaacacattaatgagagagaaagtgtgcaatttcaaataccctagtccagaaaagctgtcaaataaaattgaaccagcagatatgttgtgaactccatgccttgcatcgtgaattcagcgccaatgaaatatttaccaaactgaccaatattaagcctcaaagaaaactggtgaggatagaaaacctcacccttttttcccctttttctttttctttttttttttttgagacaggatcccacctcagccttccaagtagctgggactacaggagtacagcaccacgtccagctaattttttttcctttggtagagacagggtgtcttgctctgttgcccaggctggtcttcaattcctggcctcaagtgatcctcccaactcagcctcccaacacagtgctaggattataggcatgagccaccatgcctggcctagaacctcatctttttttttttgagacagagtctcactctgtcgcccacgctggagtgcagtggtgtgatcgcagctcactgcaacgtctgcttcccgggttcaagtgattttcctgcttcagcctccctagcagctgggactacaggcgtgcgccaccacgctcagctaatttttttgaatttttagtagagatggggtttcaccatgttggccaggctggtctccaactcttgacctcaaatgatctgcccgcctcagcatcccgaagtgctgggattacaggcgtaagccaccacgcccagcctagaacctcatcttctgaccacaatacaataaaaccaggaagagatagaaacaaagaaaagccctcagccacttggaagtttctgaactttctcttaagcaacccagggatcaaagtgaagatcagacccaacatctggaacacccagaagctggaggtgacataaacaggctgccagggtcggttcaatcccatcaaagctgggtcacagcccatgggaaaccatgaactgagcattcaagccaataaagccagaaatagaataaaacaagcttcagaagaacagaagaggggccgtgcacagaaacaataaaaatcactcaacagaggctaaacacacaaaataaagccaaacataccttctcattaaagaagataaatcttaatgaggacaaggtagattctggcattaaaaaggataaatgtgacattatggactgaatgtgtcctccccaaatttattttttatttttattttgtagagacaaggtctctctgtgttgcctaggctggtctcaaactcctgggctcaggtgatcctcctgccttggcttcccaaagtgcttggactataggtgtgagccactccacccagcaatccccccaaattcctacattgaagccctaacttccagtgtggctgaatatggaggtgggcctctaagaaaggagttaaatgggcgcggtggcacacatctgtaatcctaacactgtgggaggctgaggcgggcagatcatctgaggtcaggagctcaagaccagcctgaccaacatagtgaaactctgtccctaaaaaatacaaaaattagccgggcgtggtggcgggcgcctgtaatcctagctacttgggacgctgaggcaggagaaatgcttgaacccaggaggcagaggttgcagtgagccgagattgtgccactgcactccagcctgggccacaagagcaaaactccgtctcaaaaaaaaaaaaaaaagaaaaaatgaggtcataagtgtggggtctgatcagacagaatgagcatccttgtaagaagagacaccaggctaggcacggtggctcactcatgtaatcccagggctttgggaggctgaggtaagaggatcacttgaggccaggagttcaggaacagcctgggcaacatagcaggattctgtctctacaaaacaaaaacaaaaacaaaaccaaaacaaaaacagttggacacagtggtgcatgcctgcagtcccaggtacttggaggctccggcaagaggatcaatgagcccaggagtttgaggttttgcagtgaactgtgattgtgctgttgcactccagcctaggcaatagagaccctgtctcaaaaacaaaacagaacaccagagagctctctcctcacctctgttcccaccctcactgggcacaaaagtaaagccatgtggggacacagagaagatggccattacagtgagaaagagagtctttacgatgaaccaaattagctgggaccctgaccttggactcttggcctccagagctctgagaacaaacatttttgttgtttacccgccccctgccccatgcctgtggcactttgttacagcagcctaaataaaacaactaaaatatgtgagatgatggcaaggtgggcagaaggaaagttcaggaactatggacacaagactgtgggccctatgctacggtcaaagccaacgggttctctgaatacccaaaagctggttctctctctggctgcattctacaatcaccttaggagcttcaaacaacaccaattcctacgtgccctccagactgaatgatcagaacctgaaggtacagcccaggcaccggcactttaaaagagctccccagaagattctaatgtttagcgagaattgacagtactgtcccagtgggtcaatatctccctagcttaagacataccaggcgggatgtggtggctcacgcctgtaatcccagtgctttgggagaccaaggtgggcggatcacttcaggccaggagttcaagaccagcctggccaacatgatgaaaccctgtctcgactaaaagtacaggctgggtgcggtggttcacgccagtaatcccagcactttggaaggccgaagcgggcagatcacctgaggtcagatgtttgtgaccagcctggccaacatggcgaaaccccgtctctactaaaaatacaaaaaacaattagccgggcgtggtggtgggcgcctacactcccagctactcaggaggctgaggcaggagaatggcgtgaacccaggaggcggtgcttgcagcgagccgatatcgcgccatggcactccagcttgggcaacagagcgagactccgtctcaaaaaaaaaacaaaaaacaaaaaacaaactagccgcgtgtggtggcgcgtgcctgtaattccagctgctggagagggtgaggcatgagaattccttgaacctgggaggcagaggctgcagtgagctgagatcgtgccactgcactctaacctgggcgacagagcaagactccatctcaaatgaaaagaaaaaaaaaaaaagaaaaaagacataccagtgttttattcaaatacatgaaaaattcggccagacacggtggctcacacctgtaatcccagcattttgggaagccgaggtgggtggatcatttgaggtcaggagtttgagaccagcctgaccaacacagtgaaaccctgtctctactaaaaatacaaaaaaagggctgggagcagtggctcttgcctgtaatcccagcactcaaaacaaaaacaaaaacaaaaacaaaaacaaaaacaaaaacaaaaaaattagcctggagtggtggtgggcacctgtaactccagctatgcaggaggctgaggaaggagaacaggagaattgctggaacctatgaggtggagggtgcagtgagccgagatcgcaccactcactccagcctgggtgacagagtgagactctgcctcaataaaaagaaaaaagaaaaaaagaaaaaaaaaccatgaaaaattcaatgaaaaccagaacctacaaaaacatgtctggtataactactcctattgaggactatactagaggccacagccagtgcaataacataagaaaaaaataaaaggtacagtgacagaaaaggtttggcatgaaatgtaggtctgttaaacaaaataagaaaaggaacaagtgaagttgtacttgcagatgacatgacatttctatgtagaaaaacaaataagtgagtttattagcaaggtttcagaaggcaaattcaatacacaaaaatcgcctgtatttctatatactagcaatagacaacaggaaattgagaccatcctggctaacatggtgaaactctgtctctactaaaaatacaaaaaattagccgggcatggtggcgggtgcctgtagtcccagctactcaagaggctgaggcaggagaatggtgtgaacccaggaggcagagcttgcagtgagcggagatcgcaccactgcaccccagcctgggtgacagagagagactctgtctcaaaataataataataataacaacaatataatttacagctgggtgtggtggctcacgcctgtaatcccaacactgggaggccgaggtgggtggggatcacctgaggtcaggagtttgtgactagcctgaccaacatggtgaaaccctgtctctactaaatataaaaaattaggcaggcatggtagcacatgcctgtaatcccagctatttgggaggctgaggcaggagaatcacttgaacctgagaggtggaggttgcagtaagccgagattgcactgcagccttggtaacaagagtgagatttcatcttataaaaaaaaaaaaaatatatatatatatatatatacacacacacacacatatattattaaaaatatatatcttattaaaatatatatacatatatatgatctataatagcattaaaaatataaaatatgtggggatatatttggcaaaagacatgtcagaactgcacactgaaaactacaaaatattgctgacagagatgaaaggaaacctaaataaatggagagacataccatgttcatggattggaggactcaatattgagatcttagttctcatcaaattgatctgcaaatgttacccaaacacaaccatcaaaagccaagcaggcttctctaaaggaaaggacaagctgataaaattcacatgaaaatgtaaagtatctagaccagctgaaaaaactttgaacaagaacaaacgcgaagggctaagttcatgacttgttgaaaaactacgggaaccagacagcgtggcagcatcaagacggacatacacatcaaggaaacaggacggccagcccaaaggtagacgccacagaccctcacacacatgcagtccatgaatttttgacaggtgctgaggtgattcaacatgaggaggatcatcttttcacctaatagttctgaacaactggacagccacgtctaaaagaacgaagcccaaccacttcctcatactacatacaaatattaactcagaatggattatagacctaaatgtgaggactaaaactatgaaactttttagaagaaagcactggaaatttttttttttttgtctttttgtgagacaggatctcccactgttgcccaggctggagtacagtggtgtgatctcagctcactgcagcctcaaccttccaggctcaagcaatcctcccacttcagcctcccaagtagctgggattacaggcatgcaccaccacacctggaaatttttttttttttttggtggagatggggtctccctatgttgcacaggctggtttcaaactcctggtctcaagtgatcctcccaccttggccttccaaagtgttgggattacaggcgtgagccacctcacccagctggaaaaagtcttagtggtgtttaaaatcttttatacttaatggaaccctgaattttttttttttttcctgttttaggcagggtcttactctgtccccaggctggagtacagtgatgtaatcatggttcactgtagcctctacctactgtgctcagacaatcttcccacctcagcctcctgagtaccagggactacaagcatgcaccaccatgcctgactaatttttgtatttttttgtagagatgaggttttgccatgttgcccaggctgacctcgaactcctgggctcaagcaatctctctgcctcagcatcataatgtgcttggattacaggcatgagccactgtgcctagccaaaacactgttaagaaaattaaaatacagttgggtgtggtggcttgtgcctgtaatcccagcactttgggaggccgaggcgggaggatcgcttgagtccaggagttcaagaccagttctgtgtcttgctagtggttatataattaatttaagaggtaacactgcatagagccatacacacatgtaaaactggtgaaacctgaataaggtctatagtttagttagcagtatttcaattccctggttttgatattgtactatggaggtgtatggaggtgtaagatgttaacacaagggccgggcatggtggctcatgcctgtaatcccagcactttcggaggccaaggcgggcggatcacctgaggtcaggagtttgagaccagcctgaccaacatgcagaaaccgcgtttctactaaaaatacaaaaaatcagcccggcgtggtggcgcatgcctgtaatcccagccactcgggaggctgaggcaggagaatcacttgaacctgggagggggaggttgcggtgagctgagatcacgccattgcactccagcctgggcaacaagagccaaactccatctcaaaaaaaaaaaaaaaaagatgttaacacagagggagctggtgaagggcacaggggtctctctgtactatttttacaacttcctatgaattagtctatgattattttttttttccccagacgaagtctcgctcttgtcccccatgttggagtgcaatggcgcaatcttggctcactgcaacatctgcctccagggttcaagcaattctcctgcctcagcctcctgagtagctgggattacaggtgcccgccgccacacccggctaatttttgtattttaagtagagatggggtttcaccatgttgaccaggttggtcctcaaactcctgacctcaggtgatccgcccgcctcggcctcccaaagtgctgggattacaggtgtgagccaccgcacccagccaattatttcaaaataaacagttaataaaggtcagacacagtggctcacacttgtaatcccagcactttgggaggccgaagcaggggaatcacctgaagccaggaattggagaccagcctgggcaacacagcaagaccccgtctctacaaaaacattaataaaaaataaacaaatcaaaatcacaaaatgttaaaaaaaatgtattattactgctacattacctagaagctctattttgtgtgtgtgtgtgtgtgtgtgtgtgtgtgtgtgtgtgtgtgtgtgtgtgtgtgagagagagagagaaatagagatattgagagactgagaggtagggtcttgctctgtcacctaagctggagtgcagtggtgcaattacagcttactgcagcctcaatctcccaggcttaagggatcctcccatgtagctgagactacaggcatgagccactatgtccagctaatttttaaattttttgtagagacagggtctcgctaccttgaacgggctgaccttgaactcctgggctctggtggccctcctgtgttgacctcccaaagcattgggattacaggcatgagccactgcacccagcctagaagctctgttcatatttatttgcgaagatcaatttgatgactaagcagtaaactaatttataaaataatattaaatattaaaaccaactttaaacaattatcttcacctatgtatgtgtgtgtgtgtatatatatacacacacacacacacatatatatatatttaacaagtatctccaataccacaaccagtgtattttttgtttttttgagatggagcttcgctgatgttgtccaggctggagtgcagtggcgcgatctcggctcaccgcaaactctgcctcccaggttcaagcaattctcctgcctcagcttcccaagtagctgggactacaggtgtgcgccaccacgcccagctaattttgtatttttagtggagacctgcctcttaattctccaacatggaggggtttctccatgttggtcaggctggtctcaaactctcaacctcagatgatccgcccgccttggcctcccaaagtgctgggattgcaggcgtcgccaccgcgcacggccaccattatgcctcggcctcccacagtgctgggattacgggcgtggccactgcgcgcggccaccattgtgcctcggcctcccacagtgctgggattgcaggcgtggccaccgtgcgcggtcaccactgtattttttgacaagggtgagtcaggactgacacttaattcatttgtttgatatattaactgctttaaaaggacacacaatgctagctgcaccaaagtgcattcaaattcctcatagcatgaatctaattttaaaaaacctttgtagggcgggcatggtggctcacgactgtaatcccagcattttgggaggccgaggcgggcagatcacgacatcaggagttcaacaccagcctggccaagatggtgaaactccgtctctactaaaaatacaaaaaaaattagctgggcgcggtggcaggcgcctgtcatcccagctactcaggaggccgaggcaggagaatcgcttgaacccaggcggcagaggttgcagtgagctgagatcacgccactgccctccagcctgggggacagagtgagactccgcctcaaagaaaaaaaaaaaatcctctgtattaggaagttttattagaaaaaaatactagagcacaataagaaaatattcataacgaacttatacaaagtagcaaggaaaacattaagatgccaataaataaatgtgcaaagaacatgaacaaaagtcacacacacacaaatacaaacataatacacgagttcgttcccatgtaagaactcaatcaatatttgttgcaagactaaatgaaaaaggaaaatttatttagtgacagaaatggggaaacattcaacctcaaccctgagtgggaaaaaacttactgcccactaaattacccatctcatctcaccccggtaaataatgcccagtgctggcatgcacactggcagtatacaaactgagaaagactttctggaaagtgctacagccatgtgaccacagggcttcaccctgtgacctcattaaacctaagcagattacaggtctgaagggggctttctttagatgtggctccacctacttaggggcagatgaagaaaacaggggtctgggcagttctgaatgggaaggccaggcatcacctccctcttcagttgcacaaagtgtgcgtggcatcctcacatcccatctgcctcaatttcgctttttctctgaacacttttcaccatctgtctgaagcacacacacacattttattcacttccccattcccatgcatgaatgctaggacctttgcaattgtgggccaggaaagattgcaaatgataagccaccagcacagagagtagaaatgaaatcctggggttacaagctaaagcattactgacacccacttgtccagaacggctgaagctgggcggtgactgtcaacaggtatatacggactagaaagtggagctgctggaggaggccctgtaccttcctgccatgacacagcctccccccaagtgctgggcttgtgtgctcaacactccctcttgctgtcatcctaccacacctgcagactggaggtaatccagatgcaaggccgtcgagtcccgcaaacacccacctgcctcttaattttccaagtgagacctacatttcctcaagcgtgaagctcaataaaatcaactattgttttccgttttcatcacgagcgccactttccccctatttgttcaccgcctccactccacaagaactgctcttgacttggccaactttctgggacaccctcactacaaggatttatgagtcaaacaggtttttgtgctagcctggaaatctaactgctgacagcagttgtttcaagaagaaaatgctgttttggaaccaaacagcaggctgccaactgaaacaacataaacccacctccaagttcaaatgaaacaaacaaacaaaaagactggtccaagtgaggcaagctgtggtggctcacacctgtaatcccagcactttgggaggccaaggtgggctgatcacgaggtcaggagttcgagacaagcctggccaacacagtgaaacccgtctctactaaaaatacaaaaattagctgagcgtggtggtgggcgcctgtaatcccagctactcaggaggctgaggcaggaaaatcacttgaacccgggaggtggaggttgcagtgagccgagattgtgccactgcactccagcctgggcaacagagctagactctgtcttaaaaaaaaaaaaaaaaaaaaaagactggtcaaagtggcttacgtctgtaagatcagcactttgggaagtggaggcaggaggatctcttgaggccaggaggttgagactagcctggacaacacagtgagactctatctctacaaaaaattttataaatcagctaggtgtggtggtgcaggcctgtaatcccagctactcaggaggctgaggtgggaggatcaattgagcccaggaatttgaggttacagtgagctataatcatgccaccataaacacgcctggaggacagagtgaggccctgtttctaacatacacacacatatacacacagaaacatctcgagaggacacctccaaatgatgaagctattttgttgggtactgcggtggcacctgtgattcctcaagtagcttggaatcagcgtgctaacaccataaagtggctgcaaaagtcccagtgaagtcactgctgagagcaaacaggccttacagagaagttccaaggggacaggaaatttccagaggcttgagaggacaatgttcaggggaataagtacttgaagggaattatctaacaaggtgttaaagtaactagcttcttagacaagatgacatcaggaggaaaaaaaaacttattaaggcaaacatgtcagtttcaggccaactaaggctgtcagagagacatggaacacaagaagagaagagttttgaaatgtattcccatcaagagccaagaataatgaacttttgaatgtaaaacttagtgtgttccaaaacaagaaaggaaaaataacttgttactcggaatcgaagccaaaaggaatctcattgcttggggaggagggatgggagggtgggggtggtccttggcctgggaaggaaaactccaccaggccttcggagctgggcacgccctgttcccacaattaagaaaaaaaacgacgacctagagctcaaggccggtgctgacatctgacctactggatggcagccgcctgtaggaacatcaccatagactattggaattttctggcaagtactgggcactaaatcagagatgtgtttttagagaattccatgccaatactgctgtatagaatcttttattcatactttcccactaggtttgggcccctctaagctttcacgagtcaaagacccctcctgcttgctgaaaccacccacggaaggccggacaccgaggacctggccgcccaagcagaggcgactgacaagcgcggtccgggctggacggccccaccttccccgcccgggagagccaggccggacagcggcctccctcagacccgtccccaaggccgagcctcgccctgggccgtgctggtgccccattcgggacggagcggtggcccgtcagcacttccacggcctcctcagcaggccagatgggcagggccggcctggtgtctccccgcctggccgcgcgctcgcgggcagcgatgaccccaggcagcgggcgaccccaggcggacggcaggccgggtctgctcactcaccgttcgctgccgcgggcgcctgcgggggcgtctacatgccggaccgagcccgcaggccccgccgccgcgccgccgccagccgtcgctacctggcccttggcgccctggccgcctgttgccccatggccgcccggaccccggcgccggcgccgccgagcagcaatgcgccgcgcccgcccactgcgcaggcgcacccgccacgcatgcgcgctgccgcgcacgtggggcgtcccgcgcgtctgccgggtcccaccggcgccgggacaccccgcgcgggcgggaggcggcgggcgtggcgggaaagaggcgggcggtggggaagaggggcgaatcgcggtggagagcagtgaccagggagtggaggcgggcagcggggacaggggcgggcgtccgcgactcgggtaggcgggggtcggcgccccgaggagggcggcccccggctcccgtccccactcacctgccgcgtccggagggcgcccccgggtccgcccgccacgtctacgcctaggcgcccccgacattgtgatcccagcccggcgtcccgcccccaactcaccgccaccgcgggcgggacctcccggaccacgtgggccggctcaggggagtgcaggtgccccgcgagagctggccccgcccgccgccgcttccctaattaccgggctgtgacacggtgtgggccgagccggatttgggaaccgaaacttagagcagctgcggcagcgctgcgctccctcggggctgtccgtcggggctgggagggcggccctgcgcctgggggaaccgcgatcggcctcacgcccacctctagcggccaggtgcgccttgcacgcccacgaacgtcctcagaggtctacgcttgggatcccaaggctggcagtggagggaggacccggtggcctggggcacctctagggggaccagggagccgtgttttgcgcaccccacaggctggaggactcggggagttgggggaggaggccaaagccacaggagcggactttgtagtgtttgttggaactgcgggtcccacccagcccgcacttgctgaactggtggctgctcatcagcgccttcaggcctcaaatatcccaataatgtgccctatacccagttctcagctctcgagtcactgtcaggtaaactggcaatgcacgaccagctgctctaacctgctggtcccccaggtgccagacattgttttgtttttctgagatagtgtctcattcgtcccccaggccggagtccagtggcgggctcacggctcactgcagccttgacctctcaggtgcaagcgatccttccacttcagcttccctagtagttgggactacaagtaggtcccgccacactcgactacttcattcatatatatatatatttgtgtgtgtgtgtgtgtgtgtgtgtagagatgaggttttaccattttgcccaggctgggtctcaaacttcacccgcctcggcctcccaaagtactaggattataggcgtaagccactgcacctggcccagccattgttttctgaggttcagtccctgtctatactttctgtgtgatcacctggcccagggtcggtgtggacctgagtcctctgcagcccttccccacacccgcatacctgctctctggtcaggactcctgggacttgaatccagagacacggaacacggcctggccaagtcttcctgaaaaacacagctcttcagttcaggaccacagtgaagtacagggcaccaagggtgactggaaagggaagcaaggatcatgagaacttgggggatttcttaagctctgtaacttctcccggggttattttgcaaacccaactgtttcaaagtgaccaccagccacacccacagaagcggccttgagctgcccagttctttttctttggcggggggagagggggcggataagatcattaacataataatgcgtgagctgagtttttgcatatgatcattagcataataatgcttgatctagatggcgcacccacaagccaggcactgagccaggcctcagtagaatcttctagagtggaggcagtcaactgcttctgcagaggcaaccagtgactgtcgtgggccccaggtcacacagcaggtgcccttcgcgtgtcccgctgtgtagggagctccagcagctgccccgtctgtggcatgaaaaccctttgtctaccctgggcctgggcactgcctgcaggagagcttccctgtttcagagatgagaaaacaaaaccagggctgtggtttccttcagctgacaggttgtgcaatttctcagggcaggccccggatatgaccttgaagattcaggggccaagatctcacacccacacctcaccccaggcctggccagcaataactaagaccaaagctgggaaggctccttagggcacccagaatggtccaagaggcagctttgcttgggctgagaccaaagggaagagatgttcccgcagcaggaacagaagggtccagggctatcatgggggcttctgccagatggtgcacaggaagaggctctgccttcaagggattgggggtcaggaaaggccccctcctgcctgaccaggccccagggatggggcagcagtgggtggcatcccctgccctgaccttcctcagccccagggctgccattgctcaaggtggcagtggactcttcacataatttcgcattgttttttgtattctttaaggatggctcccatgttgtttacttcagaacccccaaaacctggacccatcctcttctgggggtcagcagggatggggagggtggagggagaagggggaacggaggccatgagggatggagcaggatggggtgcactggggtacaggttgctcctggggaggctgaggagagagggaagttggcttcaggtggcctggctccagtaaactgggtgaacgaagtctgcccagaacccacaagggtaagtggcctggagcctggggaaaggatgactgggaaggactgaggctcccagtgaaggacatcagtatggcaggctatctggtcatctcatccagcctccagccagcacccggcacaggccctgcccaggctgaaagccaggataggggcgtctgcaggggccagtgtctggatctgctcacatgacagtcttctgtttggcctggtttggggcgaggggcaacctctttcccaggatgccagccatgtgcagggcatactgaggattcaacagtggaaaccaaagtccatcaggtgttcaccttctagtggggcagacgggcaagaagcagaattggtgggggcaggcaggggttggggtacagttttgaccaaggtacccagggacaagtgtttctctctcaggcagaggcagcagcaaggaccaggaccctgaagtggtgagagcctagagtgggcggggatcatcaacagtaaccacctggcaggactgggactccctgtgtcctcacaagatccttaccaagcagcctagtataagacgaagtctcgctctgtagctcaggctggagtgtagtggcatgatctcagctcactgcaagctccgcctcccgggttcaagccattctcctgcctcagcctccagagctggagttacaggcgcacaccactgaacccggctcattttttgtatttttagcagagacggggtttcatcatgttggccaggctggtcttgaactcctgatctcaggtaatccatccacctcggcctcccaaagtgctgggattacaggcgtgagccacagcgcccggccacagcctggtacgtttattgtccacatttttcacgcgggggccagaggcacagagaggccaagtaacttgctcaaggtcacccagcgaggaaagggagctggggggtgggggtaggggacagggcgaggccagagagtagtgggaggggccgaggcggcctttcccgggagcgctcggttcccggccggcccttctattggccccagtcactcaggctcccaggtccggctcgggggggagcggggggccgcgccaggccgctgaagtgtccccgtttcgcgtgggcagagcgcgcctccccacgcatcctgctgagggccagcctctgctaggtgcgtgacacggaggggacagaacggaaaccttgtcctgctcaagtgtggacgtgcgtgccacgtgctagagtaaaattgaggtggggaacctccatccctgggacatggagcacaggggcgaccccgcgccgcttggtcaaaggaggtccgaggccctgcaggaacagcccacagccggagcgagctgcaggtcactccactgcctgtgtccacctgcgacaggtgcgcccgcgcaagcggggcggagccaggtgacccggacacaggaagcgcgccaggggcccccacaccgcggagctgctggcgacaaagggcgctgctcctgcataggccaggctaatgcaatctacaaactagatttctgtgcctacagtttgaaaatgattgcagttcactcagccagtgtggaattatcctcctctttccacactgccttagtcagtgccgctgtccaagtgcacgttgttggcgcccgttttcatttcctgttttgctaagaaagtggggcagtggcctccatgcccgccaagggacaggcaggccgccccagggaggggtccccctcagctctggctcttccaggccaaagccaaggggaaggggcaccagagggtcccaggtcccacatgccagctccctcagtctgcggggtgccaggctaggacacagaagccaacaggaatccccaaagggaggaagtggagtcgggggtgtggcagccgtgctgagatgctcggcctttatttactctgggcagggaccaagataggccactgcaggccggcaccctgcctcccggctgctggagcccctccctcccaggaactgccagccaggaaagagcctcaggtactctctgcatttaatttttaattttttttttcttttgacgcctccaagacaagttcaactctctagtgattttaagtggggtttttgtaagacagctggcagggttagggcttgtgaagaacttgcatgtctatgaagaactgatttatttcagggaaaagtgggggatgacgaagccaggcgagcccaccccgttcagcctgccaatcacacccacttcagcagcctaaaacagcaccaggtcaccccaccagggagacaacgccatagtgtcacttgcagtgctggcagatgggcacccttggtggcgtcagaaacacacccagcaccttgcctggagcagggcggctgggccctgctccgtgaatcccaagtgccctatgggagcctctccggccagggactgccagcctagaggaggggctgctgggttctctggtgcccaggggaggagggggcctacaggtactttctgctgagagccttcttcacttactaggaaaaagtttggctgggtgcggtggctcggcctgtaatcccagcactttgggaggctgaggagggcggatgacaaggtcaggagatggagaccatcctggctaagatggtgaaaccccgtctctactaaaaatacaaaaattagccgggtgtggtggtgggcacctgtagacccagctactcggaaggttgagccaggagaatggcgtgaacccaggaggcagagcttgcagtgagccgagatcgcgccactgcactccagcctgggcaagagcgagactccatctcaaaaaacaacaacaaattagccgggcatctgggccaggcgcggtggctcacacctgtaaccccagcactttgggaggctgatgtgggtggatcacaaggtcaggagatcgagaccatcctggcaaacatggtgaaaccctgtctctactaaaaatacaaaaaattagctgggcatggtagcaggcgcctgtaatcccagctacttaggaggctgaggcaggagaatcgcttgaacctgggaggtggaggttgcagtgagctgagatcgcaccattgcactccagcctgggcaaaaaagagcgaaactccgtctcaaaaaaaaaaaaaaaaaaaaattagcggggcgtcgtggtacgtgcctgtaatcccagctacttgggaggctgaggcaggagaatcacttgaacccagaaggcagaagttgcagtgagctgagatagcgccactgcactccagcctgggccacagagcgagactccacatcaagggagaaaaaaaaaaaaagttccagctgctggagccatgggaattaaaaaattactttttttttttttttgagaggcagtcttgctctctcacccaggctggagtgcagtggtgcgatcttggctcactgcaaactccgccttcccgggttcatgccattctcctgcctcagcctccagagtagctgtgattacaggcgtgtgccaccatgcccagctaattttgtattgcctatttaagattttaaaaaatcaccagtttggaaagcagggaagtggatggttctggagcctaggagcggctatttgggacacacacagccatggttttccacactaccatggccagtgctcatttttttcttactagatgcagttctttatattcagaccaagaggaacactcagttcagtcccaaggaaagctagtctctggagtaacatcctcagacattctaagggagggaaatggcagaggagaaaggcaaggcagccgcctgtggagactcccacggtgctgtgggcaaggcctatgcctggggaggggtctgggcgatggcaggtggacctccctgctctgctggcctgtgaggtggagcttcccaggaacccctccgaggagccaatgcgccactcatggattctgtgacgtggtggcggccatggcaccgcctggcatgagcaggcccgtcagacctcacagcaacagggacagcttagggaagcgggcgcgttgcaaactggaagtggacccgtaaataatcaccacaccaaagtccctcatgtcaaactgctttattacatcttaaataacagtacagtttaatatagtatctatcttgcatccagcttccttgcagtacactgactttaaaattaaatacaaaaggtggaaaggggtaagggtgcagagagctctacagagttgttggacggaaagagaaagaaggggtttcatttgtattctctttgccagatccaggcctaccgcaaggtcacagcacagttttgtatagaatgttgcagaaaacaggatggagaagccactactgctgctatgaaggagtgcggggggcggggcggggggtcccacagaacctgctttccaaacgctgctgctgaacactggccttgaaatgaacaccaggacaatctgtgtgtgatgggaatgagccacctcagatgtggagggccctgaagaatccatataggagggcaggctcttcactccctctccctccctctctctccctccccaccctcagaatccaacagcagtcgtttgcaacagaacttttttttttttaaagaaataaagaaaacagtgacttatcccgctacccaagcgtgtagagccgcgcgctgtactgcttccgatatgtgccacagagcagcaacgagaagtggacagagccgcaatggttacaactgtaagaggttatttcttaaaagaaaaagaacacctaaggactgagtcccatatgcacttttgagcatttctacagcatgcgattctaagagtaaacccacccaatatggcaaacaatcaaaatttttaaaatttaacttagaaagtctgagatcattattttcaaaacattgatttgtacattgtttcatacacaaataattgactgactatccaagcacaggacaggcatctctcttgaaaacagaggttcctcctagttgggggtggggtagtgttaggctattataaacttccctccaacttcacaaggaaacccaaagtgagattaaaaactcaactgagaagatagacaggatgggtcaggaggaacatggtgctggatctgagctcacttttcagcaaaggtgaaggattctctgatcacgcatttgagaccgtccccgcatgtgcttggccccatggcttctgaacatgttcttttctatgccacgtttgtgtgcaacaatgatctgtgacatcagacagaaaattaaaaaccagggactgaatttacatcattgacaacatcagagaggctgccctagactctctggttttgattaactgttgaacacaaaggaatacattttaaaaaggaaatatgaatgcttccaaaatcttgctacaaacatgactgaaatttggacacgatgaccagatgaacaaagccctcagcatgttttgcatgaatgccacaaaacagggtcactggtctaaaattcaaatacactggtggaaaagtgtgtctgtctgacaattacactcaagtttaccttctggttaacatttttattatatatttccttttaaaattcattcaagacaaaaaagaaaacaaagacgatggccccggaaggaatgcacaatttgttttagtttacagcacagagatctttctctcaatgggaattgtgctcttggtttcagcaataagtgaaggaaaaaagatcttgcccttttgaagttctgaggggaggtgtagggtgtccacgttagtacggttggataggatatgctctcatggtaacgcgtccaagttggaatggtcttccagtctccatggcatccacatgctgttttaaacagagtttaaagaaatgtgaaaagaggcagagaatctaagtgcagacgcacagccaggtcactgctcttcccatcactgcatgagtgtctgcagctgagggcacgtgacttcagctttctgtaaacgtttcccacaacacaattccaaatcaatgctacatcaacatttatctagaaaccgttaatgacaacttcaaatgttctatgagaaacacgcacagttctcctcagagaagggcatttgggctgctgcattacctactggcgttagttccagatcttgaggaagctatcccaggaccctgtcgccacagccatgccatcgtcagtcacgcccaggcagctgacgcggttgtcatgcccagccaagacacctgggagcaaacaacagcagaatcacaccaaagcccagaggcatcgatctcacctgtgtgccatgttgtgacgaggacggatggtgcatctctcatgggacaagacccagagtctcccacggccaggaagggagggaaagttgcatccacgtggggaattaacctgcagcatatggccagccttgttaaaattcaaagacacgcacacacacgcaatcgataaatccagagcccctggcattgacttctcagcactcacttataaaacttaaaaaaagaagcaaaggccactatcaaaaaaatcaaaactatcatcagacgcagtggcttaggcctgtaatcccagcacgttggaaggccgaggcaggcagatcatgaggtcaggactttgagaccagcctggccaatatggtgaaaccccatttctactaaaaatacaaaaaccagcagggcgtggtggtgcgggccgtagtcccagctactcaggaggctagggtaggagaatcattggaacccaggaggtggagcttgcagtgagccaagatcgtgccagtgctctccagcctgggcgacagagcgagactccatctcaaaaaaaaaaaaaaaaaatcaaaaccgccccaatctcaaagcaatctgtaacacaggagcttagaggcatgagccgtttttcctttgtctgtgatccctagagcccagcacaaggcacagaacacaggagtagcgatggtggctgagaccactggcactgcactgtcactgtcatgtgatgagggggccttctgtcaacactcccaataaccttggcttggatcatcaccagccagaagctccacttcctcccagggggatccgaaggcccatttcagccaccctcctccacctcctgcagccaccacacagctgagtacaggggccggcgtgtgctctgccaaggcctgggctggcttccaccgcccttcaacagcactgtgactgtgagacttggctggaaatggctccactctggtccccccaggctggggagaaaaagaaatgtgtttaaccaggaggtgggagtggcacccatccggaagcaggaagccccggtaagggccaagacctggagccatgctcccttctgtcctcccaggtactgagacaaatgaatctaagtctgtaagtgtcaacagttctcaaattcaaatgcccaaatgaccatttttagtaaggaagtctcatcttttgtacacctggcaataacacgcttgcctttgatatgttaactgtaacggcacccagaggtgtccctgcatggaactcctccccctgaagcagagttcagaggggaaagcacggggctgggccctggagcctgcacagctgaccctctcctgcccactgactctccccagagccctccccgacgcatgtgggaagatctgctggtactcctcggagtccacttgcctggagggtcagagctgggccatcagtttgcgactgtcactcctgctacgccatgccacagtcccaccgatactaaaacactgcagcttatgcaaccactctgtgtttgctctaaagataccacgtaaatgtccacaagacacagaaaggccccatggccacgtacctgcccggtcggctttgagtgcatcccagacgttgcagttgaagtcgtcgtacccagcaaggaggaggcgcccgctcttggagaaggagacagaggtgatcccgcagatgatgttgtcatgggagtaagtcatgagctcctggtcagcacgaaggtcaaacagcctgcaggtggcgtcgtctgagccagtggcaaatgcattgccatttggaaagaactggaaagagaaagcaaatcaagacatcatgtaaacgctcagaaagaaacattgggaatatggattgctcaatggtagggctgcagagaacacagcaggcaaagaccagcaagactgtgctctggtaagaacagagggctgggccgggtgcggtggctcatgcctgtaatcccagcactttgggaggctgacgcgggtggatcacctgagatggggagtttgagaccagcctgaccaacatagagaaaccccatctatactaaaaatacaaaattagctgggcgtggcggcgtgcgcctgtaatcccagctactcaagaggctgaagcaggagaactgcttgaaaccgggaggcggcggaggctgcggtgagccaagattgcaccattgcaccccagcctgggcaacaagagcaaaactccgtctcaaaaaaaaaaaaaaaagggtggggggatgggggaggaactacaggggactgggatgggaggggatttgcactggggaggcacacaaacactgtgatcttggacactgtgattactgtccccaaagagtagaatttattccaaaggatagtgagaaagtagtcatcactgacaggtgtgcatgttgctgtagctgccagccatcagggctaatctcatggaggaaggagggaagcgggctgaccaaggctgtggtcaggactgcagcagagctctgtccaaccaacagatacatccttctaagtctcctcacaaggccaggggctggaaacactgcctagccatccgcgtgctaaagaggagggcaggttccctggttagctgtgcccctgaccagtaaggctctgtaaccactggtggcctgagttatcttactgtctttcccctccaggatcccaaccactgctcagctgtagaggtgggaacggggactggcatacaacaccctgtgagtatctgtgagacaagtggtcaacacagagaagtttcccatcgggagttttctgtatccccatctgtacatgaggttgtataaggatcagaaaggagaacatctaatccagaaaagtttaaaatttagcaatctgaacggctagcagagacggcagaggacccgaccccacacctccacccagactcacgcaaatggcattgatgtcagactcgtggccagtgaaggtctgccggcacatgccttctcgcacatcccagagtttggctgaagcatcacaagcaccagagacgaacagtctggtgtcaggagcaagagaaaggctcatgacatctccagtgtgtccggtaaacgtggtcgtctgctggccggtctcgatgtcccacagggcactggagcaggagcgaatgacaaggggacatcagccttaacttcttgggtggctagtcatgtgacagacaatctgtccttcaaaccacccagggccacagtgagcctctgcactgttactttaaaaacgtaaattgtttaaagacaaatttaaatgtaatacaactttggaagggaaacaaagcaaagcaagcaaaattatacagagatgagcacagggcctgggcttcagaatgacgggatcgctacctcaactcaaatgccagcaaacagggagctgggggcacttttcaagcagcaccactgaggctgtgccccctctttggtcatggatgggcatggaaggggtggcaggaagctacgtggaggccctggatggcggaggggacgcgactctatctgtggctgctccctctgtgccctcccttggcctcccctccacagggtctcagaaaaggcaggcaggagaaggccaatgccaggtaaacaaatggctcacagcaattctgaggtcctcctgccctttcctggaatcacaaacaggagagcagctgagttctcagtgatcacacctggtattttttttttttttttgagaccgaatttcactcttgttgcccaggctggagtgcaatggcgcgatcttggctcaccacaacctccgcctcccgagttcaagcgattctcctgcctcagcctctccagtagctgggattacaggcatgcgccaccatgcccggctaattttgtttgtatttttagtagagacggggtttctccatattggtcagactggtctcgaactcctgacctcaggtgatccgcccgcctcggcctcccaaagtgctgggattacaggcatgagccaccgcgcccggccatacctggtattctatcacatttctgcttaacaagctgtcaaaaggtgagacgctgacagagccctgcacagagcagaagcctggctcaggtgtaaggacagctgtgagggccacacgcccaccaacatactattctcctgtgcctcgacccatggaaggcaacaccagagagcactgtccgttcatgtcagcctcagaggaaagcctggctgggcctggcaatgcaaatccaatcagccaatctcaacagacactgcacagggagcctcctctctagggcctgagggactgactgcagaagggaagcaagatacgtaaaagagtctgaaaaaaatgattaatgaacagaagcactttaaaaatatcttctaataaataaagtcttctcaagattgacaatctaggtgacaaatcttttgtaaatctatgaaatttatacaacgaggacaccttataataccacagatgctttgctgacaagttggttaagggcccatgtctcggtgaaccccaccaactgcgtgactaggggtctgtgccctgggctgggcacagctcctgccaccaaatcatgcctcagaagaccagaaaaacccacatggccagctgaagtctaaaatgactctcataaaataactatctggacatttaatttagtactttgatgccacaaatgaaaaaattctagcatttaagtgggcttccgtttacctgtaaggtgaaaacactaaaaatgaagtctgatggaatcacttgaattgtgacgtctgttatttttagtctgtgctcattgttcacaatgacatgatgctatcagaaagggacaatcaaaacccaccctactcccacctatcatcacctaaggaggtacaaatatatagaggggaaaaaaaagaagagcaggtactttgagcctgattgtagttaaaatatctatgttggccaggcatgggggctcacacctgtaatcccagcactttcagaggctgacgcaggcagatcacgaggtcaacggataagagaccatcctggccaacgtggtgaaatcccgtctctactgaaaatacaaaaattagctgggtgtggtggcgcacacctgtagttcccagctactcgggaggctgagaggggagaattgcttgaatctgggaggcagaggttgcaatgagccgagatcacgccactccactctagcctggagacagagagagactctatctcaaaaaaaaaaaaaaaaagaaaaaaatgtgtattttagttctcagctgctgaaaattaaactttgtaaatttattagaagtataatgaggctaggcacggaggctcacgcctgtaatcccagcactttgggaggccgaggtgggcaggtcacctgaggtcaggagttcaggaccagcctggccaatgtggtgaaacctggtctctactaaaaatacaaaaattagtcaggcgtggtggcgggcacctgtaatcccagctattcaggaggatgaggcaggagaatcatttaaacccggcaggcagatgtcgcagagccaagattgagccattgtactccagcctgggtgacaagaacaaaactccatctcaaaaaaaaaaaaagtataatgaattcacacattgctactatgtgttttaaatcttaaggccacttaaattacagatggcctaatattatgtcaagaaccttatttcctccatgttcacagaggaatgtgccaggggctgtgggttctcaaggcactgcctgccccgggtcaggtacttaccacgtggtgtctccagagctggtgacgatctgattgtcatccaggaatcggcagcaggacaggtaacctggcaaagaacaggcctaagtgatgagctgaatccagcaggccttgcacccagcctcatacatagagaaacacattggcccggtggaagctctacgtctaaggtaagaccagcaccatgctagtgaccttttattcccatctgtgcacacagcagaaggtccacacgcactgctggtgagggtgagagcctggccaggcaggacagcacgtcccacagagacccacagctccgtgatgggggcagaagcagaaaccacacccatgaaacatacacatctttcatctgctttactgtttgacccatcaaaggctggggatccctcgtctatttactcattcagggcacgctgactccagtgcccaggaagcagccttaaccagacagacacctcctgctctcctacagcccacgctcagcagggacagagaatgagaatcactgaaagaggacatcagaaagggagtgctaggggaaggaagaggacaaagtaggggcctcacaagatggaagccaggagaggagggaggacgagagtagactcagagaaggaggatccaaacagagggcccagccagggcaggaggcggcgaggccacagggtcagggtggcaagggcctgcaggtcatggaagggataacgaaggcaacaggaacgcggcatggcagcaacactgcagacacgggggtgctcgtgaatatgtgtgggtgggtttgttttcttggggacagtggctgtgacacccacatcagcgtgggcacaattctgtgtctctgagtattcccacccactcccactgggaaggaagcatcagaggcgagagcaggacacaccaagatgccccgtcctaaacaacttccaaaatgaggaaaagcaacaacaaaaaatcagtccgcaatatccacacatgatgactggtctctactaaaaatacaaaaattaagcgtggtggcgggcacctgtaatcccagctactcaggagggtgaggcaggagaatcatttgaacccggcagttcaagttgttaatgacttctgttgaccattatttcttttgtacattgatcacagttctggtatttactgtggaactaaaagcatagggtcaacaaaccagttagtgtgtgcccaggattggtgacagactggccctaatctgaagattcaggggttccagtggcactggtgattcttgggatacctgtttagatttgagtgtttactgaaaagccttccccccaactacaccccagggagtcatgcgacactgcgtgaatcagcaaacaacaaaaataaaatgcaccaaaagaagaaacccactggggttttaatgtagaaagtgtaagattacagagaaaacaaagcatttatttaacaaacattattatcactattttttgagacagagtctcgtgctgtcgccaggctggagtgcagtgatgtgatctcggctcaccgcaacctccacctcccaggtcaagcgattctcctgcctcagcctcccaagtagctgggactacaggtgcacgccaccacacacagctaatttttgtatttttagtagagatggggtttcaccatgttggtcaggatggtcttgatctcttgaccttgtgatccacccacctcggcttcccaaagtgctaggattacaggcgtgagccaccatgcctggccaacaaacattattaaactggctctgacagaagaaaaatatgcatagatgacagagctcaaaatattaactacgtgcctacgaaagtatgcgtggtcaaatacttcctggaggccacaccacagggacactagggaccacaaaggtgaacccaagtccagctcagaggaggatagccctgcatacctggcgccccctgtagtgccctgcagcttgctgtcgtgccccgcagctcactgtcatgctcccgggtctccacccgagccctcctccactggcttcctggttcacactcacccttgcttcagggaagcacccccaccccgtcagatgcccatccagaccaggccaccgagccttgtagcacttagcctgtttgaatgtgagcacagaagggcaggaaagaagagtcatggagacctcagcacagcctgcatctcacacaggggaccaggcggaggcactcccaagtttactgcatgaaagaatcatgaccttggctggacgcggtggctcatgactgtaatcccagcacttggggaggctgaggtcaggagtttgagaccagcctggccaacatggtgaaaccccgtctctactaaaaatataaaaattagccagctgtggtggtgggtgctgggtctgtaatcccagctactcgagaggctgaggcaggagaatcgcttgaacccaggaggcagaggttgcagtgagccgagttcacagcggtgcactccagcctgggcaacagagtgagactctgcctcaaaaaaacaaaaaacatgacctcataggtctcaaagatgacctctctgtcccaccctgtgcaggctgtagtgaagctacacagaatccatcagcttcttactccaagaaccagagactgaaccctaaaatcacagctctcaagcgctgataaaatgatgtggacaagcatcagctgacaggaactatgaaggacaaggggaatgaccgaatgtataagccacacatggcccctgacttacaattttgtgactttatgatggtttgaaagacacacgcatttaataggaaaaccatgctccaagtacccatacaactattctgtgttttcattttcaggagtgtccaataatttacatgagatgttcaactttttcttataagatatgtattatgttagatggttctgcccaaccagaggccactctaagtgtctgtgcatgttcaggttggggggtgaggtgtgtccagtgcggctggagagcaggatgggtggtgcaatgcccagggtgcaagcatactccatgaggcccagtctgtgaacagagaccaggtctaaccccttcttccaggaaagcctcgtagggccttctggccaagaggccacgagtggtgaagactgcagactctgaaatcagaaatacctgggctccactgtcagcatggcagctgaggaagagtgaaaattcctctaagttcttttagaagtcccagcctccccatgtaactggggaactgatgggaggagcagagctgtctgtgcacataagaagttctcagtaaatggagacagttactatttctgttattattgaatttgaacaaattccctgggtatgtgtggggggacacttcaggtgaaaacacgcccctcctcccctggtgcgggggcctgtgctgccaccctctggaagcctgcagaggggcagggaaaacagaccctgaacaaaagtgtgcacccagtgaggaggtgcaagggcacaaaggtggcaccaagtgcctcaaggagaggctgaaacgcggcctggggacctcgcagtggtctggtcatataggcagtgggtgtgaagggctgtcctgtgtctcatagggaccactggctatagggacaaggctgttaaagtccaggagagagggggtggcttgaagagaggcacggcagagagtggaagcgtaggagaaagatgggctcctgggcatgtggtgtcagcagaggtgcctcaaggatagagtgagtccagagtctagaaaggagcagatcaccaggctctgggaagagcacagcatgggtgcacacactgctctacccagcatggctgccgacccaaagacagcaaagccaagaaggacacacaagcgtggccagatgcagccctgtgaggaaacttacccaagaacgggacgatgggcttgagaaaccatccatctacaaggatggcgtttgctgcagcaatgtttataataaattgtgggaaactgtgaactgcctaaatgtctcacaataggaacaaattagtgcaccacaccatgaaactctctacagctcctgagttacagaacgacagtataatactatagttatataatactgtataatactactgcataactattgtataatactgtatttctggatggaattatagggtctcccaacataaaagatgatgattcaaagttcctttccaaaattcctttttttttttgagatggagtctcgctctgccacccaggctggagtgcagtggtgcggcctctgctcactgcaacctccgccaccccggttcagcacttctcctgcttcagcctcccaagtagctgggactacaggcacctgccaccacatccagctaatttttgtatttttagtagagatggggttttgccatgttggcaggctggtcttgcactcctaacatcaggtgatccacctgcctcagcctcccaaagtgctgggattataggcatgagccaccgcgcccagccccctttccaaaatttctacaatgaacacactttgaaaggtttagttctcctacctgcaccctggagaacatccctgttgggagcaggggcaaggagaccccacccaagggaggcgcacaggacacactgaaaggcaggcgggcaaatgccaagaagtcagccatgaccacgcccagtccctcactagtcctcctccgacaggtggtttcaggagcacctgtgccgccccaggatcggctccaaggagcaaaaacaagaccgtgctggcgagggacaggctcagcctagacctggagggaaaggtgcccagccctgcaccgaggcatgcacttggagagcagaggtgttttcttcaagttcagtaagaaggaaaatgaaagagatgaggaagtaacttgaagatgtgaaagtgaggctcagagggttgcacagaggagtgcccgggcaccatgagtgcctccatgatggtgtgaggctgtgaggcccaccagtgcagccaagatactggggctggtaacagtgagcctcaagcagacatcccagtcaccagctgccctgttgtggctcctgaagcagggtttacggggagacaacatatatccccttctgtgtccaagcttgtgaggcctgtcagaaaaaaatccgctattttcatgaatatagaaaatgttctgcttctcactatatgaagacaccgtgcctaaaaatgccaagttttggccaccacagtgggctctgtcactgacagctgtgcacgctgtatcatgaaggccttaggctggacttctgatcaatgcttatgtatctgtagccatcttgatcagaatgatccaggcaagggccgccgtgtctccactgcccgagaggtatgcaaagaacaaagctctaagagcaagcgttgagtctccctgcattggcccttagggatctgctttgataaaaatctgagactggatcagagggctggaaataagctttttttggagacggagtttcgctcttgttgcccaggctggagtgtagtggagcgatctcagctcactgcaaccttgcctgctgggttcaagtgattctcctgcctcaggatc

SEQ ID NO: 463 - DNA, 695 bp, Homo sapiens
accagctcagccaaatctccactctgctatagcagaagcaataatgtttgctttaaaaagatttcttgacctatgccttttcttagaaagtttgatagattagttagaacttcagatcatcagatcagtctcaaatgggtttcttggaattttatatttgacaatatttatactataccaaactcatttgcagttcttaggtttgttggttaaaacatttttttaaagcagtaagtttatagaaaatgttttcatttaatggaaggctggggaatgtccagcatcaacccctatggcatgcattcccaggggccttctcatctgggcctggaacctttggttcagggcttaggggagaacaggccacatggcaacagccacacagtcattgccttcaacacagagccacgtgtccccaaacagcaatagtcatgcccttgtccaggctgggatctaattgacacaataggtcgttgactccctcctagtagagctatctaggtttgtctggaaagtttccgaccctggcttataggcaccacacctcatgtactcctcatggcttggatctctgtattcagcctttgttcagtccaataaactttgagtagatgatctcaaaaaaaaaaaaaaagaaaaaaaaaaaaaaaaaaaaaaaaaaaaaaaaaaaaaaaaggaaaaaaaaaaaaaaaaag

SEQ ID NO: 464 - DNA, 6274 bp, Homo sapiens
gaaagtaatgacaggatttggatgaagtaatggatcactaatgaactacagtgctggtgagatgtgtaagaaattataaagagctctgatgggctatttgggtgatacccagtgcagtgaactgcaggatttttgtccctgagtcatggaagacagaagagctgaaaagtcatgtgaacaagcatgtgaatcacttaagaggcaggactatgaaatggccctcaagcactgcacagaggcccttctttctcttggccagtactccatggcagacttcacagggccttgtccattggaaatagaacgcatcacaatcgagagtcttctctacagaattgcctcatttttgcaactgaaaaattatgtgcaagctgatgaagattgtagacatgtgctgggagaaggactggccaagggagaagatgcctttcgggcagtgctttgctgcatgcagctgaaagggaagctccaacctgtatccaccattcttgccaagtcactcacaggagagtccctgaatgggatggtaacaaaggatttgacaagactaaaaacacttctctcagaaacagagacagcaactagtaacgccctctctggatatcacgtggaagacttagatgaggggtcttgtaatggttggcatttccgcccaccacctaggggaatcacaagcagcgaggaatatactttgtgtaaaagatttttagaacaaggaatctgtaggtatggtgcccagtgtacttcagcacattcccaggaagaactagcagaatggcagaaaagatatgcttcacggctgataaaattgaaacagcaaaatgagaataaacagctctcaggcagttacatggaaaccttgatagaaaagtggatgaattcattgtctcctgagaaagtgcttagtgaatgtatagaaggagtaaaggtagagcacaatcctgacctgtcagttactgtcagcaccaaaaaatcccaccagacatggacctttgctctcacttgtaagcctgcaagaatgctgtatcgtgtagcattgctttatgatgctcatcgtcctcattttagtatcattgcaatatctgccggagatagtactacccaggtatcacaagaagtcccagaaaactgtcaagaatggataggaggaaagatggcccaaaatggattagatcattacgtgtataaagtcgggatagcatttaacacagaaatatttggaacttttcgccaaaccatagttttcgactttggattggaaccagtactcatgcaaagagtaatgattgatgcagcttctacagaagatctcgaatacctgatgcatgcaaaacagcagctagtaaccacagctaaacgttgggattcttcctctaagactattatagattttgaacctaatgaaactactgatttggagaagagccttcttatcagataccaaattcccctctctgctgaccagctatttactcagtccgttttagacaaatcattgaccaagagcaactatcagtcacggttacatgaccttctttatattgaggagatagcccagtataaagaaatcagcaagttcaaccttaaagtgcaattgcagattctggcaagcttcatgctcactggtgtttctggaggtgcaaagtatgctcagaatggacaactttttggtcgctttaagcttactgaaacactttctgaagatactttggctggacgactggtgatgaccaaagtcaatgctgtttatttattaccagtccctaaacagaagttagtacagacccagggaaccaaagagaaggtttatgaagctactattgaagaaaaaacaaaggaatatatatttttaaggctatctagggaatgctgtgaagaacttaatcttcggcctgactgtgacacacaggttgaacttcagtttcaattaaatcgattacccctctgtgaaatgcactatgcactagacaggatcaaggacaatggggttttgtttccagacatcagtatgactcccaccataccatggagtcctaacagacaatgggatgaacagttggatcctcgactaaatgcaaaacagaaagaggctgttctggccattaccactccacttgcaatccagctgccgcctgtgcttatcatcggaccctatgggacaggcaaaacgttcactctagctcaggctgtcaaacatattctgcagcaacaggagactaggattctcatttgcacccattctaatagtgctgctgatctctacataaaggattatttacatccatatgtagaagcaggcaatccccaggcaagacctctcagggtatatttcagaaatcgctgggtaaagactgtccacccagttgtgcatcagtactgtttgatctcaagcgcacattccacctttcagatgccccagaaagaagatattcttaaacatcgagtggtggttgttaccttgaatacttcccagtacctctgtcagttggaccttgaacctgggttttttacacacattctattagatgaagctgcccaggccatggagtgtgaaaccattatgcctctagcattagcaactcaaaacactcggattgtcttggctggtgatcacatgcagctcagtccttttgtttacagcgagtttgccagggagagaaaccttcacgtttcattacttgaccgactctatgagcattaccctgctgagttcccatgtaggattctcctgtgtgagaactaccgctcccatgaagctatcatcaattatacctctgagcttttctatgagggcaaactgatggccagtgggaagcagccagcacacaaagatttctacccactaactttctttacagcacgaggagaagatgtacaagaaaaaaatagcacagctttttataataatgcagaggtgtttgaagtggtggaacgtgtagaagagttaagaaggaagtggccagtagcgtgggggaagttagatgatggcagtattggtgtggtgactccatatgctgatcaagtgtttagaatacgtgctgaacttcgaaaaaagagattatctgatgttaatgtagaaagggtgctaaatgttcaaggaaagcaattcagagttttgtttcttagcacagtacgtacaagacatacttgtaaacataaacagacaccaattaaaaagaaagagcaacttctggaagattccacagaggacttagattatggttttttatctaactacaagcttctcaatactgccatcacaagagcacaatccctggttgctgtggtgggtgatcccattgctctgtgctctattggaagatgcaggaaattttgggaacggtttattgccctgtgtcatgaaaacagtagcctacatggaatcacttttgaacagatcaaagcccagttagaggctttagaactaaagaagacatatgtgttgaatccgctggcacctgaatttatcccccgggctctaagactgcagcattcaggaagtaccaacaaacagcagcaatcaccacccaaggggaaaagtcttcatcatacccagaatgatcacttccagaatgatggaattgttcagcccaatccttctgtacttattggcaatcctattagagcatatactcctccaccccctcttggacctcacccaaatttgggaaaatctccaagccctgttcaaagaatagatcctcacactgggacaagtattctttatgtacctgctgtctatggagggaatgtagttatgtcggtgcctttacctgtaccatggacaggataccagggtaggtttgcagttgatcctcgaattattacacatcaggcagcaatggcctataacatgaacctattacagacacatggacgaggatctcctattccttatggccttggacatcacccacctgtcaccataggccagccacaaaatcagcatcaggagaaggatcaacatgagcaaaatcgaaatggtaaaagtgatacaaataattccggacctgaaattaataagattcgaacaccagagaaaaagccaacagaaccaaaacaggttgatttggaatcaaatccacagaacagaagtcctgaatcacgtcctagtgttgtttatcccagtaccaaatttcctcgcaaagataatctcaacccaagacacataaatcttccccttcctgctccccacgcacagtatgcaatccctaatcgccactttcatccccttccccagctaccaagaccaccctttccaattccacagcagcacaccttgttaaatcagcagcagaataatttgcctgaacaaccaaatcagataccacctcagccaaatcaggtagtccagcagcaaagtcagttgaatcagcagcctcagcagccacctcctcagctttctcctgcatatcaggcgggacccaacaatgctttttttaatagtgcagttgctcatcggccacagtctcctcctgcagaagctgtaattccggagcagcagccccctcccatgctgcaagaaggccacagtcctctgagagccattgcacaacccggccccattcttccttcacatctgaatagcttcattgatgagaacccctcgggattacctataggggaggctttagatcgtatacatgggagtgtcgctctggaaacattaaggcagcagcaggcacggttccagcagtggagcgagcatcatgcctttctcagtcagggcagcgttccatacccacaccatcaccatcctcacctccagcatcttcctcagccgcccctgggattacatcagccgccagtgagggcagactggaagctcaccagcagtgccgaagatgaagtggagaccacatactcaaggtttcaagacttaatcagagaactgtctcatcgtgatcaaagtgaaacacgggaactagctgaaatgccaccacctcaatcaagacttttgcaatatagacaagtacagagtagaagcccaccagcagtcccatctcccccatccagtacagaccacagtagccacttttctaactttaatgataacagcagagacattgaagtagccagcaacccagcatttccacagcgcctcccaccccagatattcaactcacctttctcgttgccatctgaacaccttgcccctcctcccttgaaatacctggcacctgatggagcatggacttttgctaacttgcaacagaatcacctaatggggccaggttttccctatggcctacctccattgcctcacaggccaccgcagaacccttttgtacaaatacagaatcatcaacatgctattggtcaagagccatttcacccattgtcatctcgaacagtatcttcttcttcgctccctagcttagaagagtatgagcccagaggacctggtcggcccttgtaccaaagaagaatctcatctagctcagttcaaccttgttctgaagaagtaagcactcctcaagacagtctggctcagtgtaaagagcttcaggaccacagtaaccaatcttctttcaacttttcatccccggagtcctgggtaaacaccacctcatctactccttatcagaacattccgtgcaatggatccagcaggacagctcagcccagagagttgatagcgccacccaagactgtcaaaccccctgaggatcaactgaagtcggagaacctcgaggtgtccagttccttcaactacagtgtgctgcagcatcttggccagtttccaccccttatgcctaacaagcagatcgcggagtcggccaatagcagtagcccccagagctctgcggggggcaagcccgccatgtcctatgccagcgctctgcgggcccctccaaagcccaggccccctcctgagcaggccaagaagagtagcgaccctctgtctctcttccaggaactgagcctagggagctcatctggcagcaatggcttttactcatattttaaataatcacttttttttccctcaagggagaatgttttaatttctgtttgtatcagtagaattaaggtagttggacttcatctatagatgcacagttccctttgttttaatattaaatatgttctcacttaattgctttgctgctagacttgcaactaatttttttaaagtatattccattattttgcatttttgatgtgtcaaaactttgacagcttttatgtagaataaaaaaatttttaaatttgtgtattgttacatatgtttgcatcaagctagcagccaagaggttaattgtgcaactat

SEQ ID NO: 465 - DNA, 1085 bp, Homo sapiens
gttttcttcgaagatttggggctccgcgatacagttaggatggctgtagtacctctgctgttgttggggggtttgtggagcgctgtgggagcgtccagcctgggtgtcgttacttgcggctccgtggtgaagctactcaatacgcgccacaacgtccgactgcactcacacgacgtgcgctatgggtcaagtagtgggcagcagtcagtgacaggtgtaacctctgtggatgacagcaacagttactggaggatacggcggaagagtgccacagtgtgtgagaggggaacccccatcaagtgtggccagcccatccggctgacacatgtcaacactggccgaaacctccatagtcaccacttcacttcacctctttctggaaaccaggaagtgactgcttttggtgaagaaggtgaaggtgattatctggatgactggacagtgctctgtaatggaccctactgggtgagagatggtgaggtgcggttcaaacactcttccactgaggtactgctgtctgtcacaggagaacaatatggtcgacctatcagtgggcaaaaagaggtgcatggcatggcccagccaagtcagaacaactactggaaagccatggaaggcatcttcatgaagcccagtgagttgttgaaggcagaagcccaccatgcagagctgtgaatcttgaggctctgaggcactgttaacgcacaatgttcacagacatctgttgctgcctcaccttgggatccctgccacaagttccttgggcagtggccatgtcaccattgagatgaagatatacaacagagaaatagtggctgtgtttgggaagcttcagccctgcacattttgaactagtcactctcccagacttggcggtgggtcagttctttcctgagtagaggacttgctggtaaaaggggcagatgctttttattagtactgattaaaccacactgagggaaacatccctcttagctgggaaactgtttactcttcaggagcttggcatcatggactgttaatgtatgtgattttccccctattttctctcccccacaatgataaaaacaataattttattatga

SEQ ID NO: 466 - DNA, 3468 bp, Homo sapiens
aatggcgatgcctaccacctagaactggattgtgcgctggccgccaccgctgccacctgctcagagtgaaataatgaaggtggtcaacctgaagcaagccattttgcaagcctggaaggagcgctggagttactaccaatgggcaatcaacatgaagaaattctttcctaaaggagccacctgggatattctcaacctggcagatgcgttactagagcaggccatgattggaccatcccccaatcctctcatcttgtcctacctgaagtatgccattagttcccagatggtgtcctactcttctgtcctcacagccatcagtaagtttgatgacttttctcgggacctgtgtgtccaggcattgctggacatcatggacatgttttgtgaccgtctgagctgtcacggcaaagcagaggaatgcatcggactgtgccgagcccttcttagcgccctccactggctgctgcgctgcacggcagcctctgcagagcggctgcgggaggggctggaggccggcactccagccgctggggagaagcagcttgccatgtgccttcagcgcctggagaaaaccctcagcagcaccaagaaccgggccctgctgcacatcgccaaactagaggaggcctcttcttggactgccatcgagcattctctcttgaaacttggagagatcctgaccaatctcagcaacccgcagctccggagtcaggccgagcagtgtggcaccctcattaggagcatccccacgatgctgtctgtgcatgcggagcagatgcacaagaccggcttccccactgtccacgccgtgatcctgctcgagggcaccatgaacctgacaggcgagacgcagtccctggtggagcagctgacgatggtgaagcgcatgcagcatatccccaccccactttttgtcctggagatctggaaagcttgcttcgtggggctcattgagtctcccgagggtacggaggagctcaagtggacagctttcactttcctcaagattccacaggttttggtgaagttgaagaagtactctcatggagacaaggacttcactgaggatgtcaactgtgcttttgagttcctgctgaagctcacccccttgttggacaaagctgaccagcgctgcaactgtgactgtacaaacttcctgctccaagaatgtggcaagcaggggcttctgtctgaggccagcgtcaacaaccttatggctaagcgcaaagcggaccgagagcacgcaccccagcagaaatcgggagagaatgccaacatccagcccaacatccagctgatcctccgggcggagcccactgtcacaaacatcctcaagacgatggatgcagaccactctaagtcaccggagggactgctgggagtcctgggccacatgctgtccgggaagagtctggacttgctgctggctgccgccgccgccactggaaagctgaaatccttcgcccggaaattcatcaatttgaatgaattcacaacctatggcagcgaagaaagcaccaaaccggcctccgtccgggccctgctgtttgacatctccttcctcatgctgtgccatgtggcccagacctatggttcagaggtgattctgtccgagtcgcgcacaggagctgaggtgcccttcttcgagacctggatgcagacctgcatgcctgaggagggcaagatcctgaaccctgaccacccctgcttccgccccgactccaccaaagtggagtccctggtggccctgctcaacaactcctcggagatgaagctagtgcagatgaagtggcatgaggcctgtctcagcatctcagccgccatcttggaaatcctcaatgcctgggagaatggggtcctggccttcgagtccatccagaaaatcactgataacatcaaagggaaggtatgcagtctggcggtgtgtgctgtggcttggcttgtggcccacgtccggatgctggggctggatgagcgtgagaagtcgctgcagatgatccgccagctggcagggccactgtttagtgagaacaccctgcagttctacaatgagagggtggtgatcatgaactcgatcctggagcgcatgtgtgccgacgtgctgcagcagacagccacgcagatcaagtttccctccaccggggtggacacaatgccctactggaacctgctgccccccaagcggcccatcaaagaggtgctgacggacatttttgccaaggtgctggagaagggctgggtggacagccgctccatccacatctttgacaccctgctgcacatgggcggcgtctactggttctgcaacaacctgattaaggagctgctgaaggagacgcggaaggagcacacgctgcgggcagtggagctgctctactccatcttctgcctggacatgcagcaagtgaccctggtcctgctgggccacatcctacctggcctgctcactgactcctccaagtggcacagcctcatggaccccccgggcactgctcttgccaagctggccgtgtggtgtgccctcagttcctactcctcccacaagggacaggcgtccacccgccagaagaagagacaccgcgaagacattgaggattatatcagcctcttccccctggacgatgtgcagccttcgaagttgatgcgactgctgagctctaatgaggacgatgccaacatcctttcgagccccacagaccgatccatgagcagctccctctcagcctctcagctccacacggtcaacatgcgggaccctctgaaccgagtcctggccaacctgttcctgctcatctcctccatcctggggtctcgcaccgctggcccccacacccagttcgtgcagtggttcatggaggagtgtgtggactgcctggagcagggtggccgtggcagcgtcctgcagttcatgcccttcaccaccgtgtcggaactggtgaaggtgtcagccatgtccagccccaaggtggttctggccatcacggacctcagcctgcccctgggccgccaggtggctgctaaagccattgctgcactctgaggggcttggcatggccgcagtgggggctggggactggcgcagccccaggcgcctccaagggaagcagtgaggaaagatgaggcatcgtgcctcacatccgctccacatggtgcaagagcctctagcggcttccagttccccgctcctgactcctgacctccaggatgtctcccggtttcttctttcaaaatttcctctccatctgctggcacctgaggagagtgagcagcctggaccacaagcccagtggtcacccctgtgtgcgcccgccccagcccaggagtagtcttacctctgaggaactttctagatgcaaagtgtgtatgtgtgtgtgtgtgtgtgtgtgtgtgtttgtgtgtattttgtaatatgtgagggaaatctaccttcgttcatgtataaataaagctcctcgtggctccctt

SEQ ID NO: 467 - DNA, 4221 bp, Homo sapiens
gtcggccgtcccctttaatttttaaatacacggtcccctcttttctctggggggggcaagcaagaaatcaaagaaggaggagacaagccgtcaattttctccaaaacaaaccccaccgggcaatttggtctcggggtagggggagacggggtgattgcaaattattccaggacgagatccagttctccagcgggaaaggggcaaaggaacgccgcgcgttggaagggccagggtacgcagctccccttgcagcgcccgcaggacccccgcaagctcgtgccggcgaaatcggagaccgccgatctgtcctcgttctctcctgcacgtctggctgcattcggaggaagacctggggcgcgagcgagcggcgacagcatgagcctgtgctgacctccgcgcggcgggccgagcccagggctttgtcgcggtacctgcgcccagcccgcgccgcaactctgtgcccagcttttgcaatcttttgttgcagcgctgaccgcaccaagttaaatgctcccttgcaatttttcttttttttgtttgtttgtttaatttttggagagctcgcgatcttggaaaagcctcagacgccatctacagttaaaacgtaggtaactgccctctcccgcaccccccccttacacgccccccaccctttccaccaaaaaaagggggtgcagcgcggattctggctgccgtgcgtcgccagccggtagacccgtgcttgtttcctttctctttttgtttggcttctaacgcgttgggactgagtcgccgccgtgagctccccgaagactgcacaaactaccgcgggctcctccgccccgtctgcgattcggaagccggcctgggggtcgcgtcgggagccctgcgctgcagctccgcaccttagcagcccgggtactcatccagatccacgccggggacacacacacagagtaactaaaagtgcggcgattctgcacatcgccgactgctttggggtaacaaaaagacccgagttgcctgccgaccgaggacccccgggagccgggctcggagcagacgaggtatccggcggcgcccatttgggggcttctaactctttctccacgcagcccctcttctgtcccctcccctctcgctcccttttaaaatcagtggcaccgaggcgcctgcagccgcactcgccagcgactcatctctccagcgggtttttttttgtttgtcgtgtgcgatcctcacactcatgaacatacacaggtctacccccatcacaatagcgagatatgggagatcgcggaacaaaacccaggatttcgaagagttgtcgtctataaggtccgcggagcccagccagagtttcagcccgaacctcggctccccgagcccgcccgagactccgaacttgtcgcattgcgtttcttgtatcgggaaatacttattgttggaacctctggagggagaccacgtttttcgtgccgtgcatctgcacagcggagaggagctggtgtgcaaggtgtttgatatcagctgctaccaggaatccctggcaccgtgcttttgcctgtctgctcatagtaacatcaaccaaatcactgaaattatcctgggtgagaccaaagcctatgtgttctttgagcgaagctatggggacatgcattccttcgtccgcacctgcaagaagctgagagaggaggaggcagccagactgttctaccagattgcctcggcagtggcccactgccatgacggggggctggtgctgcgggacctcaagctgcggaaattcatctttaaggacgaagagaggactcgggtcaagctggaaagcctggaagacgcctacattctgcggggagatgatgattccctctccgacaagcatggctgcccggcttacgtaagcccagagatcttgaacaccagtggcagctactcgggcaaagcagccgacgtgtggagcctgggggtgatgctgtacaccatgttggtggggcggtaccctttccatgacattgaacccagctccctcttcagcaagatccggcgtggccagttcaacattccagagactctgtcgcccaaggccaagtgcctcatccgaagcattctgcgtcgggagccctcagagcggctgacctcgcaggaaattctggaccatccttggttttctacagattttagcgtctcgaattcagcatatggtgctaaggaagtgtctgaccagctggtgccggacgtcaacatggaagagaacttggaccctttctttaactgagctcatgccccacggagacttagcaggttccaggagtgagcgagggcagcggaaaggagttcttccgggggacacgaattgcctggctgagtagcaagaaagacacactcttaagtttcttggttcagagcaggaaaaccttcaaggagctgactgaccacgtagcatgggggcaagaggcgtgggatggggattggggtgagatggatgggagcccgctggagcttgtcttccctaacatagcctgggagaccaccccttgccacttgggccacttccgcctaccccacttttcattttgttccaaaatagttgcagatcctgacagaatcaaaactctctgcctcaaacacacatcctggcatcgcactgttagcatttaacttcttgttaggattcagggaaggaacagttggccaagaattttttttcttttaaacaagccaaccacctagctggtaattaatgaggttcacttaaaaaaaaaattcggtgcacacagactgacatgaaacctgggtgctacagtaaaagaaaacaaaagtccagtttgtgtctcttaatcgctcacttcaactcatttcttctaaataaactatttaatatcctggtcaggaaatgacatgttaatgctttgctccctgaagggggaaaaaatctgtcctttaacaagctattctgttttgtgtcaattgggtccgtggcaaggaagctattaggaagtcaaacggtccaggatgcattacctgctaatccttaggtttaaagggggaaagaaaagggaagaagaaaggaaaagagaaatccaactcctttttcatgttttgcttttgaacaatgagggtttgtgtgacaggcattcctctttgctgagatgatagcaatggcctgagattttagcaagctcctggagtctgatgcttttgcagtactctgatcgcaactaaacatttgtctttgttttattagaaactagtgaaacaaagcaggttgtcccacatgtataaaatacagggcagctatttagttttctttacagagaatgatccttttaaggcttgtaaggccctctggtttggacaaaaaccctcagtagagacaagcgggaaggataattagctgaaagctatgatgatataaataaaaacagctctctatcccaatacgcacctttgtattttcaagaactcttctatttattaaggaaaatgtcacattgtgatgtattaagccagtacttcaattacgggttgacttgggatgacatattacatgctgtagttaacatttataattctttttccttgtttgagtatttctgtctctgaaataaccttttacttggcttttctagatagctttatttgatttcgagtggcaaaatgttttttattacggcttttctattgctgtatgatacagaactcttttggcataaatatttgtgttcccagtacctcacttgttcggatttgactgcctgtatatgttttgtgaaatggtcctgtttttgggtaggtgacacgtggactctagtatgtaaatgttacttgaatctgtgcttcataatagtgtgtggcatgtatgtgcagactcttggatgctttatgcctgcgcaccaggagccctgtcctcacgttcccaggagggcggcttcacccttcgtaaccaggagacaaggcggccatggatttgcccttgattctattttgctaatggaagatagaaaggagagaaggtttttttttttttttaacattctgaagatggtgctgtgtcaagaaggaccttttttttcccctctcccctattttttaagtaccttggaggaggagaggttggtgacatgcatggtggggatctatggcctctggtgctttgtcctgtatttggtttaatgtttttgtcctaatctcttcaatcaataaaattgtgcgtatttaactaaaaaaaaaaaaaaaaaa

SEQ ID NO: 468 - DNA, 3068 bp, Homo sapiens
aacggtatcgataagcttgatatcgaattccgcacccccggctcggggctgtgagcggctcggggccgggggtgggcggcggtgcggcgggcggccgacgctcctcttcggcggcggcggcggcggcggcccatgcgtggggcggcgcggctggggcggccgggccggagttgcctcccggggcccgcgctgagggccgccgccgcgcccgccctgctgcttgctcgttgcgctgttgccgctgctgccggcctgcgtgccgccgcccgtccgcggcccccggagctgcagtcggcttccgcggggcccagcgtgagtctctacctgagcgaggacgaggtgcgccggctgatcggtcttgatgcagaactttattatgtgagaaatgaccttattagtcactacgctctatcctttaatctgttagtacccagtgagacaaatttcctgcacttcacctggcatgcgaagtccaaggttgaatataagctgggattccaagtggacaatgttttggcaatggatatgccccaggtcaacatttctgttcagggggaagttccacgcactttatcagtgtttcgggtagagctttcctgtactggcaaagtagattctgaagttatgatactaatgcagctcaacttgacagtaaattcttcaaaaaattttaccgtcttaaattttaaacgaaggaaaatgtgctacaaaaaacttgaagaagtaaaaacttcagccttggacaaaaacactagcagaactatttatgatcctgtacatgcagctccaaccacttctacgcgtgtgttttatattagtgtaggggtttgttgtgcagtaatatttctcgtagcaataatattagctgttttgcaccttcataatatgaaaaggattgaactggatgacagcattagtgccagcagtagttcccaagggctgtctcagccatccacccagacgactcagtatctgagagcagacacgcccaacaatgcaactcctatcaccagttatcctaccttgcggatagagaagaacgacttgagaagtgtcactcttttggaggccaaaggcaaggtgaaggatatagcaatatccagagagaggataactctaaaagatgtactccaagaaggtacttttgggcgtattttccatgggattttaatagatgaaaaagatccaaataaagaaaaacaagcatttgtcaaaacagttaaagatcaagcttctgaaattcaggtgacaatgatgctcactgaaagttgtaagctgcgaggtcttcatcacagaaatcttcttcctattactcatgtgtgtatagaagaaggagaaaagcccatggtgatattgccttacatgaattgggggaatcttaaattgtttttacgacagtgcaagttagtagaggccaataatccacaggcaatttctcagcaagacctggtacacatggctattcagattgcctgtggaatgagctacctggccagaagggaagtcatccacaaagacctggctgccaggaactgtgtcattgatgacacacttcaagttaagatcacagacaatgccctctccagagacttgttccccatggactatcactgtctgggggacaatgaaaacaggccagttcgttggatggctcttgaaagtctggttaataacgagttctctagcgctagtgatgtgtgggcctttggagtgaacagcttgtgggaactcatgactctgggccagactccctacacgttggacattgaccccttcgagatggcggcatacctgaaagatggttaccgaatagcccagccaatcacctgtcctgatgaattatttgctgtgatggcctgttgctgggccttagatccagaggagaggcccaggtttcagcagctggtacagtgcctaacagagtttcatgcagccctgggggcctacgtctgactcctctccaatcccacaccatcaggaagaaggtgcctgtcggggctcacttgaagcctgtcagggatgctttgtatatctaacacaacgccaacagaagcacatttgtcttccagaacaccgtgccttagaaatgctttagaatctgaactttttaagacagacttaataatgtggcatattttctagatatcacttttattaggttgaactgaaagggtttttgtaaattttttggccaaaattttttaaaacatacttactttggactaggggtacattcttacaaaataaataaacagtttttaaaattgtttagacacagatatttggaattagctatcttagggccaactgctttttatttttttacttcatcaaggtgatgtaagtgactttgtttagacacagatatttggaattagcctatcttagtgccaactgctttttatttttttccttcatcaaggtgatgtaagtgactcacctttaaagtttttttagtgttattttttatcactactctgggaaatggtttgtcttcaagatgcaatacttttcttagataaggaaaaacagcataaaaagatacctggtctgccttgtacaagaaaaccgaatattagaggaagaaaatttaaagaaaagctagagaaaaaaaaaattttttaaaaaatacttattagaagcaaactgcccttgcatggaaaactgtttatttttttcagtgaaaaaggaattctgctttcgtgtttttgggaaagcaggaactgagttcattacatctttaatttggcagaaattagcctttctgtgaaccagatgtggtttggggcagatctgtagtaaacaatggtgattttatttatttttactctctggaaaaggagataatacaattccagaaagtgaactcatatttctaaggtaagatcccttttatgcacctagaatatgctatgcacagagcgggtgcttgagttgttgtcgttttttgtttgttttttaaatgtaaactggtaaattttgtgcttatcttcaaggctggcttaagtataaaattgttttttaaacacttgaaaaattaaaggatttgttttatattaaaaaaaaaa

SEQ ID NO: 469 - DNA, 8833 bp, Homo sapiens
cgccccccacgccctgggccccggagggccgcagccatgagtgaaatgtccagctttcttcacatcggggacatcgtctccctgtacgccgagggctccgtcaatggcttcatcagcactttggggctggtggatgaccgctgtgtggtggagcccgcggccggggacctggacaacccccctaagaagttccgtgactgcctcttcaaggtgtgccccatgaaccgctactcggcccagaagcagtactggaaggccaagcagactaagcaggacaaggagaagatcgctgatgtggtgttgctgcagaagctgcagcatgcggcgcagatggagcagaagcaaaatgacacggagaacaagaaggtgcatggggatgtcgtgaagtatggcagtgtgatccagctcctgcacatgaagagcaacaagtacctgacagtgaacaagcggcttccggccttgctggagaagaacgccatgcgggtgactctggatgccacaggcaacgagggttcctggctcttcatccagcccttctggaagctgcggagcaacggggacaacgtggtcgtgggggacaaggtgatcctgaatcctgtcaatgccgggcagcctctgcatgccagcaattacgagctcagcgacaacgccggctgcaaggaggtcaattctgtgaactgcaacaccagctggaagatcaacctgtttatgcagtttcgggaccacctggaggaggtgttgaaagggggagacgtggtgcggctgttccatgcggagcaggagaagttcctgacgtgtgacgagtacaagggcaagctgcaggtgttcctgcgaactacactgcgccagtctgccacctcggccaccagctccaatgctctctgggaggtggaggtggtccaccacgacccctgccgtggaggagctgggcactggaatggcttgtaccgcttcaagcacctggctacaggcaactacctggctgctgaggagaaccccagttacaaaggtgatgcctcagatcccaaggcagcaggaatgggggcacagggccgcacaggccgcaggaatgctggggagaagatcaagtactgcctggtggctgtgcctcatggcaatgacatcgcctctctctttgagctggaccccaccaccttgcagaaaaccgactctttcgtgccccggaactcgtacgtccggctgcggcacctctgcaccaacacgtggattcagagcaccaatgtgcccattgacatcgaggaggagcggcccatccggctcatgctgggcacctgccccaccaaggaggacaaggaggcctttgccatcgtgtcagtgcccgtgtctgagatccgagacctggactttgccaatgacgccagctccatgctggccagtgccgtggagaaactcaacgagggcttcatcagccagaatgaccgcaggtttgtcatccagctgctggaagacctggtgttctttgtcagcgatgtccccaacaatgggcagaatgtcctggacatcatggtcactaagcccaaccgggaacggcagaagctgatgagggagcagaacatcctcaaacaggtctttggcattctgaaggtcccgttccgtgagaaggggggtgaaggtcccctggtgcggctggaggagctgtcagaccagaagaacgccccctaccagcacatgttccgcctgtgctaccgtgtgttgcggtattcccaggaggactaccgcaagaaccaggagcacattgccaagcagtttgggatgatgcagtcccagattggctacgacatcctggccgaggacaccatcactgccctgctgcacaacaaccgcaagctcctggaaaagcacatcaccaagaccgaggtggagaccttcgtcagccttgtgcgcaagaaccgggagcccaggttcctggactacctctctgacctgtgtgtgtccaaccacatcgccatccccgtcacccaagagctcatctgcaagtgtgtgctggaccccaagaacagtgacattctcatccggaccgagcttcggcccgtgaaggagatggcccaatcccacgagtacctgagcatcgagtactcagaagaggaagtgtggctcacgtggactgacaagaataacgagcatcatgagaagagtgtgaggcagctggcccaggaggcgcgggccggcaacgcccacgacgagaatgtgctcagctactacaggtaccagctgaagctctttgcccgcatgtgcttggaccgccagtacttggccatcgacgagatctcccagcagctgggcgtggacctgattttcctgtgcatggcagacgagatgctgccctttgacctgcgcgcctccttctgccacctgatgctgcacgtgcacgtggaccgtgacccccaggagctggtcacgccggtcaagtttgcccgtctctggactgagatccccacagccatcaccatcaaggactatgattccaacctcaacgcgtcccgagatgacaagaagaacaagtttgccaacaccatggagttcgtggaggactacctcaacaatgtagtcagcgaggccgtgccctttgccaacgaggagaagaacaagctcacttttgaggtggtcagcctggcgcacaatctcatctacttcggcttctacagcttcagcgagctgctgcggctcactcgcacactgctgggcatcatcgactgtgtgcaggggcccccggccatgctgcaggcctatgaggaccccggtggcaagaatgtgcggcggtccatccagggcgtggggcacatgatgtccaccatggtgctgagccgcaagcagtccgtcttcagtgcccccagcctgtctgctggggccagtgctgctgagccgctggacagaagcaagtttgaggagaatgaggacattgtggtgatggagaccaagctgaagatcctggaaatccttcagttcatcctcaacgtccgcctggattaccgcatatcctacctgctgtctgtcttcaagaaggagtttgtggaggtgtttcccatgcaggacagtggggctgatggcacagcccctgccttcgactctaccactgccaacatgaacctggatcgcatcggggagcaggcggaggccatgtttggagtggggaagacaagcagcatgctggaggtggatgacgagggcggccgcatgttcctgcgcgtgctcatccacctcaccatgcacgactatgcgccactggtctcgggtgccctgcagctgctcttcaagcacttcagccagcgccaggaggccatgcacaccttcaagcaggttcagctgctgatctcagcgcaggacgtggagaactacaaggtgatcaagtcggagctggaccggctgcggaccatggtggagaagtcagagctgtgggtggacaagaagggcagtggcaagggtgaggaggtggaggcaggcaccgccaaggacaagaaagagcgtcccacggacgaggagggctttctgcacccaccaggggagaaaagcagtgagaactaccagatcgtcaagggcatcctggaaaggctgaacaagatgtgcggggttggggagcaaatgaggaagaagcagcaacggctgctgaagaacatggatgcccacaaggtcatgctggacctgctgcagatcccctatgacaagggtgatgccaagatgatggagatcctgcgctacacgcaccagttcctgcagaagttctgtgcagggaaccccggcaaccaggccctgctgcacaaacacctgcacctcttcctcacgccagggctcctggaggcagagaccatgcagcacatcttcctgaacaactatcagctctgctccgagatcagcgagcctgtgttgcagcacttcgtgcacctgctggccacgcacgggcgccatgtgcagtacctggacttcctgcacaccgtcattaaggccgagggcaagtacgtcaagaagtgccaggacatgatcatgactgagctgaccaatgcaggtgacgatgtggtcgtgttctacaatgataaggcatcgctggcccacctgctggacatgatgaaggccgcccgcgacggcgtggaggaccacagccccctcatgtaccacatttccctggtggacctgctggccgcctgtgccgagggcaaaaacgtctacactgagatcaagtgcacctccctcgtgccgctggaggacgtggtgtctgtggtgacgcatgaggactgcatcactgaggtgaaaatggcctatgtgaacttcgtgaaccactgctacgtggacacggaggtggagatgaaggagatctacaccagcaaccacatctggacgctctttgagaacttcaccctggacatggctcgggtctgcagcaagcgtgagaagcgcgtggctgaccccaccttggagaagtacgtgctgagcgttgtgctggacaccatcaacgccttcttcagctccccattctctgagaacagcacttccctgcagacacaccagccggttgtggtgcagctgctgcagtctaccacacgcctcctcgagtgtccgtggctacagcagcagcacaagggctccgtggaggcctgcatccggaccctcgccatggtggccaagggccgggccatcttgctgcccatggacctggatgcccacatcagctcgatgctcagcagtggagccagctgtgcagctgccgcccagcggaacgcctccagctacaaggcaaccacgcgggccttcccccgcgtcacccccaccgccaaccagtgggactacaagaacatcattgagaagctgcaggacatcatcacagccctggaggagcggctgaagcccctggtacaggctgagctgtccgtgctggtggatgtcctgcactggcctgagctgctcttcctggagggcagtgaggcctaccagcgctgcgagagtgggggcttcctgtccaagctgatccagcacaccaaggacctcatggagtcggaggagaagctgtgcatcaaggtgctgcggaccctgcagcagatgctcgtcaagaagaccaagtacggggaccggggcaaccagctgcgcaagatgctgctgcaaaactacctccagaaccggaagtccacctcgcggggggaccttcccgaccccataggcactggcctggacccagactggtcggcaatcgcagccacccagtgccggctggacaaggagggggccaccaagttggtatgcgacctcatcaccagcaccaagaacgagaagatcttccaggagagcatcggcctggccatccacctgctggatggtggcaacacagagatccagaaatccttccacaacctgatgatgagtgacaagaagtcagagcgcttcttcaaggtgctgcacgaccgcatgaagcgggcccagcaggagaccaagtccacggtggcagtcaacatgaatgacctgggcagccagccacatgaggaccgcgagccagtcgaccccaccaccaaaggccgcgtggcctccttctcgatacctggctcctcatcccgctactcgctgggccccagcctgcgccgggggcacgaggtgagcgaacgtgtgcagagcagtgagatgggcacatccgtgctcatcatgcagcccatcctgcgctttctgcagctgctgtgtgagaaccacaaccgggacctgcagaacttcctgcgctgtcagaacaacaaaaccaactacaacttggtatgcgagacgctgcagttcctggacatcatgtgcggcagcaccacgggcggcctggggctgctggggctctacatcaatgaggacaacgtgggcctcgtcatccagaccttggagaccctcactgagtactgccagggcccctgccatgagaaccagacttgcattgtgactcacgagtccaatggcatagacatcatcaccgcactgatcctcaatgacatcagccccctgtgcaagtaccgcatggatctggtgctgcagctcaaggacaatgcctccaagctgctcctggctctgatggagagccggcatgacagtgaaaatgctgagcgaatcctcatcagcctgcggccccaggagctggtggacgtcatcaagaaggcctacctgcaggaggaagagcgtgagaactcggaggtgagcccacgtgaagtgggccataacatctatatcctggcgctgcagctctccaggcacaataaacagctgcagcacctgctgaagccggtgaagcgcattcaagaggaggaggccgagggtatctcttccatgctcagcctcaacaacaagcagctgtcacagatgctcaagtcctcagcgccagcacaggaggaggaggaagaccccctggcctactatgagaaccacacgtcccagatcgagattgtgcggcaggaccgcagcatggagcagatcgtgttcccagtgcccggcatctgccagttcctgacggaggaaaccaagcaccggctcttcaccactactgagcaggacgagcagggcagcaaagtgagcgacttcttcgaccagtcctccttcctgcacaacgagatggagtggcagcgcaacgtccgcagcatgccgctgatctactggttctcccgccgcatgaccctgtggggcagcatctccttcaacctggccgtgtttatcaacatcatcattgccttcttctacccttacatggagggcgcgtccacaggcgtgctggactcccctctcatctcattgctcttctggatcctcatctgcttctccatcgcggccctgttcaccaagcgctacagcatccgccccctcatcgtggcgctcatcctgcgctccatctactatctgggcatcgggcccacactcaacatcctgggtgccctcaatctgaccaacaagatcgtgtttgtggtgagcttcgtgggcaaccgtggcaccttcatccggggctataaggccatggtcatggacatggaattcctctaccacgtgggctacatcctgaccagtgtcctgggcctctttgctcatgagctgttctacagcatcctgctctttgacctcatctaccgcgaggagacgctgttcaacgtcatcaagagtgtgacccgcaatggccgctccatcctgctgacagccctgctggccctcatcctggtctacctcttctccatcgtcggcttcctcttcctcaaggatgacttcattctcgaggtcgaccggctgcccaacaaccactccacagccagccccctggggatgccacatggagctgctgcatttgtggacacctgcagtggggacaagatggactgtgtctcagggctctcggtgcctgaggtcctggaagaggacagggagctggacagcacagagcgggcctgtgacactctgttgatgtgcatcgtcactgtcatgaaccatgggctacgcaacggtggtggcgtgggcgacattctccgcaagccctccaaagatgagtctctcttcccagcccgagtggtctatgacctcctgttcttcttcatcgtcatcatcattgtgctgaacctcatctttggggtaatcatcgacaccttcgctgacctgcgtagtgagaagcagaagaaggaggagattcttaagacgacatgcttcatctgtggtctggagagggacaagtttgataacaagacagtgtcatttgaggaacacatcaagctggagcacaacatgtggaactacttgtacttcattgtgctggtccgcgtgaagaacaagaccgactacacgggccctgagagctacgtggcccagatgatcaagaacaagaacctggactggttcccccggatgcgggccatgtcccttgtcagcaatgagggcgagggggagcagaatgagattcggattctccaggacaagctcaactccaccatgaagctggtgtcccacctcactgcccagctcaacgagctcaaggagcagatgacggagcagcggaaacgcaggcaacgcctaggctttgtggatgtccagaactgcattagccgctgaggagagccaccgaaggccccaacaggggatgctcatcactggagactgcgactgggaagaacactgccccctccctcgggttgggtggcccagccagctggccagcctccactcccactctgccagacaccctgacacccacccaggctttgaagagcatggagggggagcctcagagctgacagtcctgcttagagcccttaaaaagacttgaaagttcactgggactcagtttaccttaatgccttagcagaagataaatcctacctagagacctttgttccttaaagcaataactgacaactctttgtagtcctccttgtgggtagttaagagtggggtcacccctttaactccaagcactacattttggcggctgcggcctctgggggaggtggcagttatgctgttactagtgattttagggctttgttatttaacttatttcaagggtgctgtgctcagccctgcccatggctgtgcagctccctccgtgcctcagatctgctgtagccagtgcagacctcactgtcgtgtccatgccacccccggcatggctccaggtggcctggtgactccatgatggacgatcttgctcccaggacctgcctcttcccaggcttcctggggaagagttgtacgcccaggcaacaagggctgagctgcgcttgcgtggctgtttcatgaccgcttgtttttctccttttggtgtaatgttttacaaatcctttggcctgagaactaatatgttaattgccttaaataaattaatagaaatcta

SEQ ID NO: 470 - DNA, 2262 bp, Homo sapiens
gaattccggcgcgctgcgaccgttggggctttgttcgcgggggtcacagctctcatggctgcagctagcgtgaccccccctggctccctggagttgctacagcccggcttctccaagaccctcctggggaccaagctggaagccaagtacctgtgctccgcctgcagaaacgtcctccgcaggcccttccaggcgcagtgtggccaccggtactgctccttctgcctggccagcatcctcagctctgggcctcagaactgtgctgcctgtgttcacgagggcatatatgaagaaggcatttctattttagaaagcagttcggccttcccagataatgctgcccgcagggaggtggagagcctgccggccgtctgtcccagtgatggatgcacctggaaggggaccctgaaagaatacgagagctgccacgaaggccgctgcccgctcatgctgaccgaatgtcccgcgtgtaaaggcctggtccgccttggtgaaaaggagcgccacctggagcacgagtgcccggagagaagcctgagctgccggcattgccgggcaccctgctgcggagcagacgtgaaggcgcaccacgaggtctgccccaagttccccttaacttgtgacggctgcggcaagaagaagatcccccgggagaagtttcaggaccacgtcaagacttgtggcaagtgtcgagtcccttgcagattccacgccatcggctgcctcgagacggtagagggtgagaaacagcaggagcacgaggtgcagtggctgcgggagcacctggccatgctactgagctcggtgctggaggcaaagcccctcttgggagaccagagccacgcggggtcagagctcctgcagaggtgcgagagcctggagaagaagacggccacttttgagaacattgtctgcgtcctgaaccgggaggtggagagggtggccatgactgccgaggcctgcagccggcagcaccggctggaccaagacaagattgaagccctgagtagcaaggtgcagcagctggagaggagcattggcctcaaggacctggcgatggctgacttggagcagaaggtcaggcccttccaggcgcagtgtggccaccggtactgctccttctgcctggccagcatcctcaggaagctccaggaagctgtggctggccgcatacccgccatcttctccccagccttctacaccagcaggtacggctacaagatgtgtctgcgtatctacctgaacggcgacggcaccgggcgaggaacacacctgtccctcttctttgtggtgatgaagggcccgaatgacgccctgctgcggtggcccttcaaccagaaggtgaccttaatgctgctcgaccagaataaccgggagcacgtgattgacgccttcaggcccgacgtgacttcatcctcttttcagaggccagtcaacgacatgaacatcgcaagcggctgccccctcttctgccccgtctccaagatggaggcaaagaattcctacgtgcgggacgatgccatcttcatcaaggccattgtggacctgacagggctctaactgccccctactggtgtctgggggttgggggcagccaggcacagccggctcacggaggggccaccacgctgggccagggtctcactgtacaagtgggcaggggccccgcttgggcgcttgggagggtgtcggcctgcagccaagttcactgtcacgggggaaggagccaccagccagtcctcagatttcagagactgcggaggggcttggcagacggtcttagccaagggctgtggtggcattggccgagggtcttcgggtgcttcccagcacaagctgcccttgctgtcctgtgcagtgaagggagaggccctgggtgggggacactcagagtgggagcacatcccagcagtgcccatgtagcaggagcacagtggatggccttgtgtccctcgggcatgacaggcagaaacgagggctgctccaggagaagggcctcctgctggccagagcaaggaaggctgagcagcttggttctcccctctggcccctggagagaagggagcattcctagacccctgggtgcttgtctgcacagagctctggtctgtgccaccttggccaggctggctgtgggagggtctggtcccacgccgcctctgctcagacactgtgtgggagggcacagcacagctgcgggtaaagtgtgagagcttgccatccagctcacgaagacagagttattaaaccattacaaatctc

SEQ ID NO: 471 - DNA, 586 bp, Homo sapiens
ttcccatgaccctctgtaggatgtcttggatgctgctttcctgcctgatgttcctttcttgggtggaaggtgaagaatctcaaaagaaactgccttcttcacgtataacctgtcctcaaggctctgtagcctatgggtcctattgctattcactgattttgataccacagacctggtctaatgcagaactatcctgccagatgcatttctcaggacacctggcatttcttctcagtactggtgaaattaccttcgtgtcctcccttgtgaagaacagtttgacggcctaccagtacatctggattggactccatgatccctcacatggtacactacccaacggaagtggatggaagtggagcagttccaatgtgctgaccttctataactgggagaggaacccctctattgctgctgaccgtggttattgtgcagttttgtctcagaaatcaggttttcagaagtggagagattttaattgtgaaaatgagcttccctatatctgcaaattcaaggtctagggcagttctaatttcaacagcttgaaaatattatgaagctcacatggacaaggaagcaagtatga

SEQ ID NO: 472 - DNA, 944 bp, Homo sapiens
tctcccgaattcggcacgaggcggcgtctcgaggcgagttggcggagctgtgcgcgcggcggggcgatggggggctcgggcagtcgcctgtccaaggagctgctggccgagtaccaggacttgacgttcctgacgaagcaggagatcctcctagcccacaggcggttttgtgagctgcttccccaggagcagcggaccgtggagtcgtcacttcgggcacaagtgcccttcgagcagattctcagccttccagagctcaaggccaaccccttcaaggagcgaatctgcagggtcttctccacatccccagccaaagacagccttagctttgaggacttcctggatctcctcagtgtgttcagtgacacagccacgccagacatcaagtcccattatgccttccgcatctttgactttgatgatgacggaaccttgaacagagaagacctgagccggctggtgaactgcctcacgggagagggcgaggacacacggcttagtgcgtctgagatgaagcagctcatcgacaacatcctggaggagtctgacattgacagggatggaaccatcaacctctctgagttccagcacgtcatctcccgttctccagactttgccagctcctttaagattgtcctgtgacagcagccccagcgtgtgtcctggcaccctgtccaagaacctttctactgctgagctgtggccaaggtcaagcctgtgttgccagtgcgggccaagctggcccagcctggagctggcgctgtgcagcctcaccccgggcaggggcggccctcgttgtcagggcctctcctcactgctgttgtcattgctccgtttgtgtttgtactaatcagtaataaaggtttagaagtttgaccctaaaaaaaaaaaaaaaaaaaaaaaaaactcgagaagctttggacttcttcgccagagtgtgtcaa

SEQ ID NO: 473 - DNA, 3394 bp, Homo sapiens
  misc_feature (3200)..(3200): n is a, c, g, or t
acatagagataaagggaatgaactataaagacactggcatctctgtttcccacaaatcaagacattcatgaaattaatgactaacttacaatgaattttttagaggtgtgtctcataaggaaaaacctggatgatatgggaccccgcaggtgattgggggcgtagcctggagtgagggtttggctggtgtagcttggagtgaggccccctggcgtggagtcttgaggcctgctgagggcgtgagatggcatgaggcgaagagagggccatggcaccgactccgagatgggtcaaggacccgtacgggagtcgcaatcctcagaccctcccgcgctccagttccggataagcgagtataagccgctgaacatggcgggagtggagcagcccccgagccccgagctgcggcaggaaggcgtgaccgaatacgaagatggcggggccccggcgggagatggcgaggcgggcccccaacaggcggaggaccacccccagaatcctccagaagatcccaatcaggaccccccagaggatgatagcacctgtcagtgccaggcgtgcgggcctcaccaagccgcgggtccagatcttggttcctctaatgatggctgccctcagctgttccaggagcggtcagtcatagtggagaactcctcaggctctaccagcgcttctgagctcctcaaacccatgaagaagaggaagcgcagggaataccagagcccatcagaggaggagtcggagccagaggccatggagaagcaagaagaaggaaaggacccagagggacaacccactgctagcaccccagagagtgaggagtggagcagcagccagcctgcaacaggtgagaagaaggaatgctggtcgtgggagtcctacctagaggagcagaaggccattactgctccagtcagcctcttccaggactcccaggcagtcactcacaacaagaatggcttcaaactgggcatgaagttggaaggcattgaccctcaacacccgtccatgtacttcatcctcaccgtggctgaggtatgtggctatcgcctacgcctgcactttgatgggtattctgagtgccatgacttctgggtcaatgccaactcccctgacattcaccctgctggctggttcgagaagacgggccacaagctgcagcttcccaaaggttacaaggaggaggagttcagctggagccagtacatgtgcagcacaagagctcaggctgcccccaagcacatgtttgtgagccagagccacagtcccccacccttgggcttccaggtgggcatgaagctggaggctgttgaccgcatgaacccgtcccttgtctgcgtggccagtgtgaccgatgtggtggacagccgcttcctggtgcactttgacaactgggatgatacttatgactactggtgtgatcccagcagcccctacatccacccagtgggctggtgccagaagcaaggaaagcccctcacccctccacaagactacccagaccctgataacttctgttgggagaaatatctggaagaaactggggcctctgctgtccccacctgggccttcaaggtgcgaccccctcacagcttcctggtcaatatgaagctggaggctgtggaccgcaggaacccagccctgattcgcgtggccagcgtggaggatgtggaggaccatcggataaagatccactttgatggctggagtcatggctatgatttctggatcgacgctgatcacccagacatccaccctgccggctggtgctccaagacaggacatcccctgcagcctcctctcggacccagagagcccagctctgcctcccctgggggctgtccccctctcagctataggagcctgccccacactaggacctccaaatacagctttcaccaccggaagtgccccactcctggttgcgacggctctggccatgtcacaggcaagttcacagctcaccattgcctctcaggctgcccactggctgagaggaaccagagccggctgaaagcggagctgtctgacccggaggcctcagcccgcaagaagaacctctcaggcttctccccaaggaagaagcctcgccatcacggccgaattggacgccctccgaagtatcgaaagattccgcaggaagatttccagaccctcacgcccgatgtcgtgcaccagtccctcttcatgtcagccctgtcggcccaccctgaccgctcactctcagtgtgctgggagcagcactgcaagctcctgccaggagtagcgggcatctcagcctcgacagtcgccaagtggaccatcgatgaggtcttcggctttgttcagaccctgacaggttgtgaggaccaagcacgcctcttcaaagacgaggcaagaatagtcagagtgacccatgtatctgggaagactctagtctggactgtggcccagcttggggaccttgtgtgctcagatcatcttcaggaaggaaaaggcatcctggagacaggagtccattcactcctctgctctctacccactcatttgcttgccaaacttagctttgccagtgatagtcaatattaaagtgtacttttttcccctttaatccaatatagttgataattaaagtgtattttgaatgacacagatattgtgatttactgcaaggatcctaacacacacttaaaatcaagagccaaggagtagtgagttgtagataaaaaaagaatgtcagctttggagacagtctgggtttaaatcccagttctgtcaatttgagctgtttactgtctctgagcctacatcttcttgtctgtaaaatggagataaaatgggtttaatgaggtctaccttgcagagccattgtgagcattggaaatgatgaatgaatcataccagaacgtctagtataattacagtcatgcattgcttaacgatggggatacattcttagaaatgtgtcactaggcaattctgtcattgtgtaaacattataggatgtacttacacaaacctagatgttatatgtatttttatttacatgtatattttcacatgaaataccaaatgtcacagcattattactgaatgtcagtcatttcccctacttgatctgcaatgccaatatcaagggccatgtatcaggtttctgtatatgttccactataatcttatgggaccatggttttaaatgtggaatcattgacagaaatgtntttatgtagcatatggctgtgtatcactagtatataatagagcaatattatggaggaatatgtagatccaatcactttacctatacaaaatgactgctatggtgggaacacaataaacaccagttttgacttttaaaaaaaaaaaaaacaaaaaaaaaaaaaaaaagcggccgctgaattcacctgcccgggcg

SEQ ID NO: 474 - DNA, 766 bp, Homo sapiens
  misc_feature (2)..(6): n is a, c, g, or t
  misc_feature (10)..(10): n is a, c, g, or t
  misc_feature (122)..(122): n is a, c, g, or t
  misc_feature (169)..(169): n is a, c, g, or t
  misc_feature (172)..(172): n is a, c, g, or t
  misc_feature (189)..(189): n is a, c, g, or t
  misc_feature (211)..(211): n is a, c, g, or t
  misc_feature (214)..(216): n is a, c, g, or t
  misc_feature (220)..(220): n is a, c, g, or t
  misc_feature (223)..(223): n is a, c, g, or t
  misc_feature (229)..(229): n is a, c, g, or t
  misc_feature (236)..(236): n is a, c, g, or t
  misc_feature (242)..(244): n is a, c, g, or t
  misc_feature (271)..(271): n is a, c, g, or t
  misc_feature (274)..(274): n is a, c, g, or t
  misc_feature (283)..(283): n is a, c, g, or t
  misc_feature (289)..(289): n is a, c, g, or t
  misc_feature (301)..(301): n is a, c, g, or t
  misc_feature (321)..(321): n is a, c, g, or t
  misc_feature (332)..(332): n is a, c, g, or t
  misc_feature (364)..(364): n is a, c, g, or t
  misc_feature (369)..(369): n is a, c, g, or t
  misc_feature (381)..(381): n is a, c, g, or t
  misc_feature (389)..(389): n is a, c, g, or t
  misc_feature (423)..(423): n is a, c, g, or t
  misc_feature (438)..(438): n is a, c, g, or t
  misc_feature (467)..(467): n is a, c, g, or t
  misc_feature (503)..(503): n is a, c, g, or t
  misc_feature (505)..(505): n is a, c, g, or t
  misc_feature (509)..(509): n is a, c, g, or t
  misc_feature (511)..(511): n is a, c, g, or t
  misc_feature (521)..(521): n is a, c, g, or t
  misc_feature (528)..(528): n is a, c, g, or t
  misc_feature (539)..(764): n is a, c, g, or t
  misc_feature (766)..(766): n is a, c, g, or t
tnnnnntacncaggatggacaaggcttagagccaggttggagaagatgaaagagcattactagaggagtggggaggcctaggctatgctctttactctgaccatagactgcgtgatcttggncaggccatgtaacctctcagggctgtgcactcccttattggtaaacntgnggggctgggccagaatntttccaagggttcttcttgcantgnnnggcnagntcccangaggganaaaagnnnaaaaggtggacaactctccctaattcntanttccccaanggttanggacctgggganttatttgaaaggcctggaangaggatccagntaaaagcctaagtccctggaaaggccagggcncactnccctgattgttnagggtgtnaacagagctttggggtccccgaagttttcttaantttttcccctaacanagggggtatccaagagaaagagtttcttnccccccatcccacttggggtagagggggtaaatttngntttngngaagaacaancctgggnggggggggggnnnnnnnnnnnnnnnnnnnnnnnnnnnnnnnnnnnnnnnnnnnnnnnnnnnnnnnnnnnnnnnnnnnnnnnnnnnnnnnnnnnnnnnnnnnnnnnnnnnnnnnnnnnnnnnnnnnnnnnnnnnnnnnnnnnnnnnnnnnnnnnnnnnnnnnnnnnnnnnnnnnnnnnnnnnnnnnnnnnnnnnnnnnnnnnnnnnnnnnnnnnnnnnnnnnnnnnnnnnnnnnnnncn

SEQ ID NO: 475 - DNA, 735 bp, Homo sapiens
  misc_feature (16)..(16): n is a, c, g, or t
  misc_feature (58)..(58): n is a, c, g, or t
  misc_feature (75)..(75): n is a, c, g, or t
  misc_feature (81)..(81): n is a, c, g, or t
  misc_feature (259)..(259): n is a, c, g, or t
  misc_feature (294)..(294): n is a, c, g, or t
  misc_feature (371)..(371): n is a, c, g, or t
  misc_feature (379)..(379): n is a, c, g, or t
  misc_feature (413)..(414): n is a, c, g, or t
  misc_feature (443)..(443): n is a, c, g, or t
  misc_feature (475)..(475): n is a, c, g, or t
  misc_feature (482)..(482): n is a, c, g, or t
  misc_feature (487)..(487): n is a, c, g, or t
  misc_feature (491)..(491): n is a, c, g, or t
  misc_feature (497)..(497): n is a, c, g, or t
  misc_feature (499)..(499): n is a, c, g, or t
  misc_feature (513)..(513): n is a, c, g, or t
  misc_feature (523)..(538): n is a, c, g, or t
  misc_feature (541)..(541): n is a, c, g, or t
  misc_feature (546)..(546): n is a, c, g, or t
  misc_feature (550)..(550): n is a, c, g, or t
  misc_feature (555)..(555): n is a, c, g, or t
  misc_feature (559)..(571): n is a, c, g, or t
  misc_feature (574)..(575): n is a, c, g, or t
  misc_feature (577)..(577): n is a, c, g, or t
  misc_feature (579)..(580): n is a, c, g, or t
  misc_feature (583)..(583): n is a, c, g, or t
  misc_feature (588)..(588): n is a, c, g, or t
  misc_feature (590)..(597): n is a, c, g, or t
  misc_feature (601)..(601): n is a, c, g, or t
  misc_feature (605)..(606): n is a, c, g, or t
  misc_feature (608)..(609): n is a, c, g, or t
  misc_feature (615)..(616): n is a, c, g, or t
  misc_feature (618)..(628): n is a, c, g, or t
  misc_feature (631)..(639): n is a, c, g, or t
  misc_feature (642)..(643): n is a, c, g, or t
  misc_feature (645)..(657): n is a, c, g, or t
  misc_feature (659)..(664): n is a, c, g, or t
  misc_feature (666)..(670): n is a, c, g, or t
  misc_feature (672)..(685): n is a, c, g, or t
  misc_feature (687)..(695): n is a, c, g, or t
  misc_feature (697)..(720): n is a, c, g, or t
  misc_feature (722)..(722): n is a, c, g, or t
  misc_feature (724)..(730): n is a, c, g, or t
  misc_feature (732)..(735): n is a, c, g, or t
ccccttttcctcatgncattaacgagaaagagatgaaaataaagatgacagctccagngacaagctacgtggagnctggtncaggtccttttagtgagtctaccattaccatttccctgtatattccctctgaacagcaatttgatccacccaggcctttagagtcagatgtcttcattgaagatagagccgaaatgactgtgtttgtacggtctttcgatggattttctagtgcccaaaagaatcaagaacaactttngacattagcaagcattttaggggaaagatggaaangttttcgaatgagaagggtttactacaactgcaggctacaacagccctgtcaaattgctttaattagaaatactgangtggtggnagggattccaaaaaaattgaaccccacccaaagnnaaacgaattgagaaaaatgaaaggaagtnctgcttgtccagaggcaaacatcttgttttcnatggganatcancaancccggncntcactggttacagngctgcaaaannnnnnnnnnnnnnnnttncccantttntgccnaaannnnnnnnnnnnnccnncntnnttncccancnnnnnnnntttncccnntnnttccanncnnnnnnnnnnnccnnnnnnnnntcnncnnnnnnnnnnnnncnnnnnncnnnnncnnnnnnnnnnnnnncnnnnnnnnncnnnnnnnnnnnnnnnnnnnnnnnncncnnnnnnncnnnn

SEQ ID NO: 476 - DNA, 1012 bp, Homo sapiens
catgaaggaactcacactctagagaaaccctatgaatgtaagcaatgtgggaaattgttatctcatcgctcaagctttcgaagacacatgatggcacacactggagatggccctcataaatgcacagtatgtgggaaagcctttgattctcctagtgtatttcaaagacatgaaaggactcacactggagagaaaccctatgaatgcaagcaatgtgggaaagccttccgtacttccagttcccttcgaaaacatgaaacaacacacactggagagcaaccctataaatgtaaatgtggaaaagcttttagtgatttattttcctttcaaagtcatgaaacaacacacagtgaagaggagccttatgaatgtaaggagtgtgggaaagcatttagttcttttaaatacttttgtcgccatgaaaggactcacagtgaagaaaaatcttatgagtgtcaaatttgtgcaaagccttcagtcgtttcagttacttaaaaactcatgaaagactcacacggcagagaagccatatgaatgtaagcaatgcaggaaagcattcttttggccctctttccttctaagacatgaaaggactcacactggagaaagaccctatgaatgtaaacactgtggtaaagccttcagtcgttccagtttctgtcgagaacactgaaagaactcacatgagagaagccctatgaatgtaaggaatgtgggaaagccttcagttctctcagttcctttaatagacataaaaggacacactggaagatattctataagtgtatgaatgtgggaaagcattcattggttttatcacattcagatacttgaaagaaataaatcctgtgaatgtaaacgtggtaaagccttaagaagtttccaggctgggcgcagcggctcacacctgtaatcccagcactttgagaggccgaggagggcagatcacgaggccaggagatcgagaccagcctggctaacatgggaaaccctgtctctactaaaaatacgg

SEQ ID NO: 477 - DNA, 6711 bp, Homo sapiens
gaattcccttgtaaggttttcttaacaaaacaccagtcacataagtgcattttattttatatttttgtttatttatttgagacggagtctcttgtctctcaggctggagtgcagtggcgccatctctgctcgctgcaacctccacctcctgggttccagcgattctcctgcctcagcctcccgagggggtagctgggactacaggtgcgcaccaccatgcccagctaattttgtatttttcgtagagatggggtttcaccatgttgtccaggctggtcttgaactcctgacctcaggtgatcctcccgcctcggcctcccaaagtgctggaattacaggcgtgatccaccgcacccggcctattttttgagagagggtcacactctgtcgtcccggctggaatgcagtgatgcgatcaccgcccactacagcctcgacctccgggctcaagcaatcctccccgcccagcctcctgagtagcgagcgcctcgacgcccagctaatttttatttttatttatttttttgtagagacggcgtctctctaagatgcccaggctggtggccggtgtcgaactcctaagatgaagcgatcctccccggccttggcctccgcgcctcctaaagcgccaggtatgagccaccgcgcctggcctacaagtgcattttaattaaagtattattaatgtctttgcctgaagaaattcgcttttaaattgtgacttatctttcacccaaaaatcaaagcacaattcagccccgaggcgggggcggtaggagctgggcggggcgggggcagggaaagaccaggagcagagattcaaaaagagtaagagggcaaaatgtgcataatgcatcttcacaggtaagagcctggccaggctcctgttttaatggcttcctcctgaagaagattcaagcagagtgtaagatattttcggaaagtagagcattttgaaagcatttcataatctctcaaaaccggagactgctcctgtcccacctcgttagagaaaacagcgatgctcaaaggcaacctccttcctgacattgcctggtaggacgcgacgtggtgtttgcccgcgcggaatgcggacgcaaggctgctcctaggtctcggggacgcgccatccccatttccgctcgcggaggcgtagggtccgggcgcgggaccccagtcgaccttgactggcggcgcgaccttgaggcctgcgttcgcctcagttgccccctctgtgcaatggggagacgcgcctcatcgcttgacaacggccgaagagccgccgcgcttccgtctcccgcgtgcgcgcgccatgctgcccacccccgttccgcactgaccctcccccgtgccccgcgtcccgtactgccgccccgccccgagtcccatgccgcagccaccgcgacggagcccgcaggcgggaacctgcctccgcgcgttagcgcgcacgcgcgcctcatgtgtcgtccccatcagcgccggcttccgtctataggccagatgcactgtcactctggcgaagtcgcagacccgattggccgggacggaggcgcgagaccgggttgcgggcggggccgaacgtggtataaaacgggcgggaggccaggctcgtgccgttttgcagacgccaccgccgaggaaaaccgtgtactattagccatggtcaaccccaccgtgttcttcgacattgccgtcgacggcgagcccttgggccgcgtctcctttgaggtcgggcgggcggcggcgtgcgggaatggggcccagaaagtgggccggggtcggggtgggtggtagcgccccaaaggcccgggcgcggggcgaccctgcttgaggggcgagcgcgggcgggctgcggcgccatttcctgacgaggggccattttgggaggtccgcgagtcgcgggaggaggccgggacgcggcggacaaaggcaggcggggcggctgcgaggccgttgggggagggggcccgcgtccgcccgcccgcctcatgtggccgcgccctgtcctgtccgacgcacgtgctcggcggccgcgctcaggtccgcgccttgagagtcgttgtccgccctagcttggcctgggcgccgcagaccggagccagaagcacgctcgcgggggcttgcgaccgccttcctgggaagctgtcccctggcaggcatgggtgctttacatcctgagctgggaagctgtttgcttgagggtttttctcaaggatcgaggcgcggtgtgagcccgtccatgctcggtcctgtagatcccgggaggccatgttataaaaggagacttgctgggatgtgacgggttgccacttgaaatatcttccatttggataaagtaggaatatttatacatgtgccccaaacgtccctccgtgtcccccacccccaagcggaaatgtgaaaatgggccttgcctttgctggtgcccaaggaccgccttccactgcagtgacggcgctggcgggggaggcgctcttgagcccctcccgattgtccctctgcctagcaagcaagttgcgactggccacaaggcaggcctcttccgaccaaggtggattaccagtgattacctaattagttttgagagcgttaaatgagttcttaaagatcagttgtaattatagcatagtatctaaacttggcgcgtgtcttcaaagttaaatattgagtacgattccgttccagttaacatggatagaccttagggagtagcgaaataggatgttagtggttttattcctttaaatcacatctcaaaaggccaccaatggctagtttggatcttattccgaaaatagattgatcctcatgcagtcttcgtgaggacagagcgatttccttgttgcctaccctgtccatagtgcctggcacataggcactgaaacactgcatgttaatccacaccccaccccacctatgagtgtagtcaaagctggtaagtgacaagggctttcgtggaaacttggcctgacctaatgttgggcatcaggttacccaaagagcttcagggaaatgagaaaggacttgcaggtcttgatgagaatggaggggtaactgccaatgagggctttggctttagcgaaagtctgaaagggaagccataggaacttaaacgtaccgactataaagctctgagaaaagctgatgttttagaaagaccatacattctaggtacaaatacctaaaaactaaaaaataagtacgttggccaggcgggcggatcacgaagtcaggagattgagaccatcctgggcccctggtgaaaccccacctctattaaaaatacaaaaattagctgggcgtggtggcgcttgcctgtaatctcagctactctagaggctgaggcaggagatcgcttgaaccccggaggcggaggctgcagtgagccgagatcgtgccactgcactccagcctggtgacagcgagactcttgtctcaaaaaaaaaaaagtacattgctataagagaagtgcacacggatactagtagttaattcagtcacatctgtgaaatagcttataaaatgctacttttaaacaagctgtttttatgaaagggcttgtaaatgtttatggtatttaagctacctctctagccataacgtattatacattcaagaaaggttcaaaaccagatatactagaaaccaatctttattttttaccccactactaggtaagggcctggataccaagaagtgactgctcatctaatccataaagctatgttaacagattggaggtagtagcattttcattacaagtgactaaaagaacagctgtttacccctgatcgtgcagcagtgcttgctgttccttagaattttgccttgtaagttctagctcaagttggggggtggtgatagacatttaagaagccatatatcttttcagaagtaggtgtgatgtactaaaagtttgagacactttctagaagtctcactatttaagttatgactagtattggatttttggcatgtctttgggtttcatgtttcttaacccaactgcctgcagggccttatggctgtcaggagcagttcttgggaattaaagtaattactgaagaagtattctagtgagaaaatgaatttatgactcagaagcccctaaagacatgggtactaagcaacaaaataagcagatgttaattaactgtaattttctcttacagctgtttgcagacaaggtcccaaagacagcaggttggtccattttctaagtttaacaaagatgttccaattgtgacagtttgtgtgtgtgtgtgtatatatatatttttatgtatgtatatatgtgtttaatttttttttaaacagaaaattttcgtgctctgagcactggagagaaaggatttggttataagggttcctgctttcacagaattattccagggtttatgtgtcaggtacgaaatttactgaattttattttatttgggttgctcccttcatttgggattgagccagaatatttcaggatacacatatctgaactgttactctaccatttcggttctatttaacccttctattcagtttgaacttgggtttaaagtttgaaccttgcagatttggcacacttcatggttatgttgtcagaagtgacatttttcctatatgttgacagggtggtgacttcacacgccataatggcactggtggcaagtccatctatggggagaaatttgaagatgagaacttcatcctaaagcatacgggtcctggcatcttgtccatggcaaatgctggacccaacacaaatggttcccagtttttcatctgcactgccaagactgagtggtaagggtacaacatggcacactaaccacctgactaaatgaaaagttgccctggggggaacggaacaaacactacttttcttcaacctttgcttccacagactttttcatccctaagatactagaagaagagcatacataaatgacaaatatagccaatgtgatacagaatgtcagatactatgatagaaacttggcccttagctgggtggttgaattaggtgctacttttttgagatggagttttgctctgttgccaggttggagtgcagtggcacaatctgggctcactgcaacctctgcctcctgggttcaagcgattctcctgccttggcctcctgagtagctgagaatacagatgtgtgccagcatgcctggctaattttttgtatttttgtggagacggggtttcatcatgttggccaagctggtcttgaactcgtgacttaaggtgaaccacctgccttggccccccaaagtgctgggatttcaggcatgagccactgcgcccaaccaattaagtgcttttttttttttttttcttttctcagactggatctcgctcttatctcccaggttggagtgcagtggtgccatctcagctcactgcaacctcctcccgggttcaagcaattcttctgcctcagcctctcaagtagctggaactacaggcatgcaccaccactcccagctaaattgtgtattattagtagagcgggatttaccatgttgtccaggctggtctcgaactcctgggctcaagtgatctgcctgccttgacccccccgaagtgctgggattacaggcatgagccactgtgcccacccaattaagtgctgcttttatgttactattaataacatgcggttggttgggttttttgtttctttggggtttttgttttgttttgtttgtttttgggggaggggggcgcaattcattctatatgtgtaactcttttttgagatggagtttcgctctgtcgcccaggctggagtgcagtggcgcgatctcggctcactgcaagctccgcctcccaggttcacgccattctcctgcctcagcctcccgagtagctgggactataggcacatgccaccatgcccggctaattttttgtatttttagtagagacagggtttcaccgtgttagccaggatggtctcgatctcctgacctcgtgatccgcccgccttggcctcccaaagtgctgggattacaggcgtgagccaccgcacccggcctatatgtgtaactctttaatggtaattggagaatcatgtttaatgacatttagtacaaaaggcttcagttaaaaaaaaaaaaaaaaagctacctttctcgtcttggttcatgacacatggaggctgcttgtttgtggttgccagtcataatgattgttcttccttttcaaggttggatggcaagcatgtggtgtttggcaaagtgaaagaaggcatgaatattgtggaggccatggagcgctttgggtccaggaatggcaagaccagcaagaagatcaccattgctgactgtggacaactcgaataagtttgacttgtgttttatcttaaccaccagatcattccttctgtagctcaggagagcacccctccaccccatttgctcgcagtatcctagaatctttgtgctctcgctgcagttccctttgggttccatgttttccttgttccctcccatgcctagctggattgcagagttaagtttatgattatgaaataaaaactaaataacaattgtcctcgtttgagttaagtgttgatgtaggctttattttaagcagtaatgggttacttctgaaacatcacttgtttgcttaattctacacagtacttagattttttttactttccagtcccaggaagtgtcaatgtttgttgagtggaatatt

SEQ ID NO: 478 - DNA, 459 bp, Homo sapiens
atggggaaggttatcagtgcttcccgagtgagcatggaacacttcgagttccagggttatagacagtcgttcccagtgtggctgaggccacccagaggcagcagagcattcagactccaaacagacccctgttcatgccgatgcttgcacgaccgccccagttcctgtggctccctcggaatgctaaggggatcggacatgaaaggaccctgtgagccgattgtcctatctccagcggccctgtcatccagctcactcatcaatgggccagtcaggcccaggcactgggctccggaggactcaccactgccccctgctgccatgtggacctggtgcaagttgaggacttcttgctggtctagtcacgcatgcagtgttggggatgccttggtttttactgctctgagaattgttgagatactttactaataaactgtgtagttggaaaaaaaaaaaaaa

SEQ ID NO: 479 - DNA, 1070 bp, Homo sapiens
gcgattgctggggctgcagcgctgcctccgagaccgagagtgggtggagcgggtcttcctggaagggtgcgataaggccgggcgaggtgcctgggatgcttctccccttccgcgaggaagagatctaattgggtagggcgggtgtagactagcctgccgagccgcccgctggcacctgcagcctcctgggcgcccgcgggcccggcgagaaagttgttaaagggagcgaggtggttgttcctggggtccgaggcgcgcctctcacgccctgcccaacagaagccgcagtcccgtggggtctggagacgcagtttccttgttaatgacaataaatccctgctccccctgcctcagacatctacgcagcgaaatcgagcctggccttgagggtccacaccgcgaggaagatgcgtgcgcccattccagagcctaagcctggagacctgattgagatttttcgccctttctacagacactgggccatctatgttggcgatggatatgtggttcatctggcccctccaagtgaggtcgcaggagctggtgcagccagtgtcatgtccgccctgactgacaaggccatcgtgaagaaggaattgctgtatgatgtggccgggagtgacaagtaccaggtcaacaacaaacatgatgacaagtactcgccgctgccctgcacgaaaatcatccagcgggcggaggagctggtggggcaggaggtgctctacaagctgaccagtgagaactgcgagcactttgtgaatgagctgcgctatggagtcgcccgcagtgaccaggtcagagatgtcatcatcgctgcaagcgttgcaggaatgggcttggcagccatgagccttattggagtcatgttctcaagaaacaagcgacaaaagcaataactgaaaaagactgtctgtcagcgatgactttatacatcaagggggtcttgttttgctagagagtttggggtttggtttgtggatttcattgtgatttataataaggcttattttcacagaataaaataaagcaaaacgagggaggattttattgggggagtgcagcccaaaaaa

SEQ ID NO: 480 - DNA, 850 bp, Homo sapiens
cccctacgacgtggccattgacatgtggagcctgggctgcatcacggcggagttgtacacgggctaccccctgttccccggggagaatgaggtggagcagctggcctgcatcatggaggtgctgggtctgccgccagccggcttcattcagacagcctccaggagacagacattctttgattccaaaggttttcctaaaaatataaccaacaacagggggaaaaaaagatacccagattccaaggacctcacgatggtgctgaaaacctatgacaccagcttcctggactttctcagaaggtgtttggtatgggaaccttctcttcgcatgaccccggaccaggccctcaagcatgcttggattcatcagtctcggaacctcaagccacagcccaggccccagaccctgaggaaatccaattcctttttcccctctgagacaaggaaggacaaggttcaaggctgtcatcactcgagcagaaaagatgagatcaccaaagagactacagagaaaacaaaagatagccccacgaagcatgttcagcattcaggtgatcagcaggactgtctccagcacggagctgacactgttcagctgcctcaactggtagacgctcccaagaagtcagaggcagctgtcggggcggaggtgtccatgacctccccaggacagagcaaaaacttctccctcaagaacacaaacgttttaccccctattgtatgacctttgctgagggtatgtcctgctcctttccaccagtgatttgtattaagacagcacttatattgtacaatacttcagactgttttttttaaatacataaaactttatgttaaaaactctaaaaaa

SEQ ID NO: 481 - DNA, 1478 bp, Homo sapiens
gcgggcgacacgagggccgcggtgcagtgtccgacccgagagttgcggcctgagtcaccggccccgccctccggagccggacgctccgggaggcccgggagcggcagtggaaccgactcccagaactccggacgtgtgcggcgcagtgagtcgcagccatgttcctggttaactcgttcttgaagggcggcggcggcggcggcgggggaggcgggggcctgggtgggggcctgggaaatgtgcttggaggcctgatcagcggggccgggggcggcggcggcggcggcggcggcggcggcggtggtggaggcggcggtggcggtggaacggccatgcgcatcctaggcggagtcatcagcgccatcagcgaggcggctgcgcagtacaacccggagcccccgcccccacgcacacattactccaacattgaggccaacgagagtgaggaggtccggcagttccggagactctttgcccagctggctggagatgacatggaggtcagcgccacagaactcatgaacattctcaataaggttgtgacacgacaccctgatctgaagactgatggttttggcattgacacatgtcgcagcatggtggccgtgatggatagcgacaccacaggcaagctgggctttgaggaattcaagtacttgtggaacaacatcaaaaggtggcaggccatatacaaacagttcgacactgaccgatcagggaccatttgcagtagtgaactcccaggtgcctttgaggcagcagggttccacctgaatgagcatctctataacatgatcatccgacgctactcagatgaaagtgggaacatggattttgacaacttcatcagctgcttggtcaggctggacgccatgttccgtgccttcaaatctcttgacaaagatggcactggacaaatccaggtgaacatccaggagtggctgcagctgactatgtattcctgaactggagccccagacccgccccctcaccgccttgctataggagtcacctggagcctcggtctctcccagggccgatcctgtctgcagtcacatctttgtggggcctgctgacccacaagcttttgttctctcagtacttgttacccagcttctcaacatccagggcccaatttgccctgcctggagttccccctggctctaggacactctaacaagctctgtccacgggtctccccattcccaccaggccctgcacacacccactccgtaacctctcccctgtacctgtgccaagcctagcacttgtgatgcctccatgccccgagggcctctctcagttctgggaggatgactccagtccctgcacgccctggcacacccttcacggttgctacccaggcggccaagctccagaccgtgccagacccaggtgccccagtgcctttgtctatattctgctcccagcctgccaggccaggaggaaataaacatgccccagttgctgatctctaa

SEQ ID NO: 482 - DNA, 581 bp, Homo sapiens
  misc_feature (474)..(474): n is a, c, g, or t
tcgaatactgaaaaagtcctttgggctctgtggggttccccacgctcacggctcctttctcccacactcactgcccttcttcccacagcaaatctatttcaaggacagtactttttaaaatgattaatgttgagttctcaactagctctgcagaactagaggagctgtttgcatctgtctgtgcggatggagtttcttttatctgacaccaggtctccaaccacactgaaacaaggcatttatctacagagctcaactagaaccccttttcattaggctactccacttccttcccctcatacctaccccacatcagccacgtggttaagaaggcagctgcttattcttcatcttggctttggccatgttgtagtctcctgagtcaaagtacttttgccctttctggagtctcttcatgaggaagtcggagcctccaggcttttgtcctaggcttgggtatttggcctttagctntgcctcttcagctctctcaggcagaataccttctttctcctgcgtgtcctgcttctcctcgccggtctcctccgcagggttctcttcttcttgtttctgggacatgg

SEQ ID NO: 483 - DNA, 1958 bp, Homo sapiens
gctgctgcgcccgcggctccccagtgccccgagtgccccgcgggccccgcgagcgggagtgggacccagccctaggcagaacccaggcgccgcgcccgggacgcccgcggagagagccactcccgcccacgtcccatttcgcccctcgcgtccggagtccccgtggccagatctaaccatgagctaccctggctatcccccgcccccaggtggctacccaccagctgcaccaggtggtggtccctggggaggtgctgcctaccctcctccgcccagcatgccccccatcgggctggataacgtggccacctatgcggggcagttcaaccaggactatctctcgggaatggcggccaacatgtctgggacatttggaggagccaacatgcccaacctgtaccctggggcccctggggctggctacccaccagtgccccctggcggctttgggcagcccccctctgcccagcagcctgttcctccctatgggatgtatccacccccaggaggaaacccaccctccaggatgccctcatatccgccatacccaggggcccctgtgccgggccagcccatgccaccccccggacagcagcccccaggggcctaccctgggcagccaccagtgacctaccctggtcagcctccagtgccactccctgggcagcagcagccagtgccgagctacccaggatacccggggtctgggactgtcacccccgctgtgcccccaacccagtttggaagccgaggcaccatcactgatgctcccggctttgaccccctgcgagatgccgaggtcctgcggaaggccatgaaaggcttcgggacggatgagcaggccatcattgactgcctggggagtcgctccaacaagcagcggcagcagatcctactttccttcaagacggcttacggcaaggatttgatcaaagatctgaaatctgaactgtcaggaaactttgagaagacaatcttggctctgatgaagaccccagtcctctttgacatttatgagataaaggaagccatcaagggggttggcactgatgaagcctgcctgattgagatcctcgcttcccgcagcaatgagcacatccgagaattaaacagagcctacaaagcagaattcaaaaagaccctggaagaggccattcgaagcgacacatcagggcacttccagcggctcctcatctctctctctcagggaaaccgtgatgaaagcacaaacgtggacatgtcactcgcccagagagatgcccaggagctgtatgcggccggggagaaccgcctgggaacagacgagtccaagttcaatgcggttctgtgctcccggagccgggcccacctggtagcagttttcaatgagtaccagagaatgacaggccgggacattgagaagagcatctgccgggagatgtccggggacctggaggagggcatgctggccgtggtgaaatgtctcaagaataccccagccttctttgcggagaggctcaacaaggccatgaggggggcaggaacaaaggaccggaccctgattcgcatcatggtgtctcgcagcgagaccgacctcctggacatcagatcagagtataagcggatgtacggcaagtcgctgtaccacgacatctcgggagatacttcaggggattaccggaagattctgctgaagatctgtggtggcaatgactgaacagtgactggtggctcacttctgcccacctgccggcaacaccagtgccaggaaaaggccaaaagaatgtctgtttctaacaaatccacaaatagccccgagattcaccgtcctagagcttaggcctgtcttccacccctcctgacccgtatagtgtgccacaggacctgggtcggtctagaactctctcaggatgccttttctaccccatccctcacagcctcttgctgctaaaatagatgtttcatttttctgaaaaaaa

SEQ ID NO: 484 - DNA, 952 bp, Homo sapiens
gcagtctgcagcatggcgtacccggggcatcctggcgccggcggcgggtactacccaggcgggtatggaggggctcccggagggcctgcgtttcccggacaaactcaggatccgctgtatggttactttgctgctgtagctggacaggatgggcagatagatgctgatgaattgcagagatgtctgacacagtctggcattgctggaggatacaaaccttttaacctggagacttgccggcttatggtttcaatgctggatagagatatgtctggcacaatgggtttcaatgaatttaaagaactctgggctgtactgaatggctggagacaacactttatcagttttgacactgacaggagtggaacagtagacccacaagaattgcagaaggccctgacaacaatgggatttaggttgagtccccaggctgtgaattcaattgcaaaacgatacagcaccaatggaaagatcaccttcgacgactacatcgcctgctgcgtcaaactgagggctcttacagacagctttcgaagacgggatactgctcagcaaggtgttgtgaatttcccatatgatgatttcattcaatgtgtcatgagtgtttaaatcaagaggaagctgcatgaatgtaatcaacattccaactggagctctcctttgcttgtcctctttgccttcggtaatatgtataaacttacatcacgactttctcttaacagctgttgtaaagtttattactttatgtacaactgaagttttgttttagttttgataataaattcttggaactttaataagatctagtctgttacaccatttagaactttcctcagccattatcagtcatgccttattttcttgctaaaactctatgtaaatttaagtatgcaaaatgtttaagtcacattatttatttttcattgtgagatactaaaaactgttatcagac

SEQ ID NO: 485 - DNA, 1664 bp, Homo sapiens
ggcacgagggcggcgcgcgcgcaggtcggtgcgtctgtcgggggcgcgctcgggtacctgtacccccacgtagtcgccggttaccgatcggactaagttccagtggtgatttacaagtcaagttaaaatgtccccagaagtggccttgaaccgaatatctccaatgctctcccctttcatatctagcgtggtccggaatggaaaagtgggactggatgctacaaactgtttgaggataactgacttaaaatctggctgcacatcattgactcctgggcccaactgtgaccgatttaaactgcacataccatatgctggagagacattaaagtgggatatcattttcaatgcccaatacccagaactgcctcccgattttatctttggagaagatgctgaattcctgccagacccctcagctttgcagaatcttgcctcctggaatccttcaaatcctgaatgtctcttacttgtggtgaaggaacttgtgcaacaatatcaccaattccaatgtagccgcctccgggagagctcccgcctcatgtttgaataccagacattactggaggagccacagtatggagagaacatggaaatttatgctggaaaaaaaaacaactggactggtgaattttcagctcgtttccttttgaagctgcccgtagatttcagcaatatccccacataccttctcaaggatgtaaatgaagaccctggagaagatgtggccctcctctctgttagttttgaggacactgaagccacccaggtgtaccccaagctgtacttgtcacctcgaattgagcatgcacttggaggctcctcagctcttcatatcccagcttttccaggaggaggatgtctcattgattacgttcctcaagtatgccacctgctcaccaacaaggtgcagtacgtgattcaagggtatcacaaaagaagagagtatattgctgcttttctcagtcactttggcacaggtgtcgtggaatatgatgcagaaggctttacaaaactcactctgctgctgatgtggaaagatttttgttttcttgtacacattgacctgcctctgtttttccctcgagaccagccaactctcacatttcagtccgtttatcactttaccaacagtggacagctttactcccaggcccaaaaaaattatccgtacagccccagatgggatggaaatgaaatggccaaaagagcaaaggcttatttcaaaacctttgtccctcagttccaggaggcagcatttgccaatggaaagctctaggaaacaccagtcttgagaggtggccagccagactgcctgtccacatgcgtgtcagcacatacagccgcttcctggaagccgcctggaatgtcttcacggcagcgttttgctcacacagcagcttttgcacgccccaggcagccccgactgctgaaatccaacttgagctggctggtggtccctggatcctagagcccttcacttcgggttactccctctttcttgcctctatttcttagttggaagaaataaactcacaaattatggtgcagtaattttccggggaaagtaaagcctcaggaatgcccacgcctttcttccaaagcctttgtctctgagacctcttaagttctaagattaaatgcccctcgctgttcttcctctg

SEQ ID NO: 486 - DNA, 6336 bp, Homo sapiens
cgccgctcaggccctggagcggacggttcctactgcggctgggcaccggctccgctcccgcgtctgcccgcgctccagctgcgcctggcccggccccggcccggctcggcgtggccccggcctccaagcgaaggcgccgctgccgctgggccgctcccagggccatgaggaagcggcggcagccactgcggcccgcgtcaaggacttctccagacaggttatgttacctgcagaggctgccctgaagctccctgtggcctggagactatgtacaagaggaatggtctgatggctagcgtgttggtcacctctgccactccacagggcagcagcagctcggactctctggagggccagagctgcgactatgccagcaagagctatgatgccgttgtcttcgatgtcttgaaagtgaccccagaggagtttgctagccagattacattaatggatatacctgtgtttaaagctatccagccggaggaactagccagctgtggatggagtaagaaggagaaacacagtcttgcccctaacgttgtggcctttacccggaggtttaaccaggtcagtttttgggttgtacgagaaattctaacagcacagactttaaaaataagggcagaaatcctcagccattttgtgaaaatagccaagaaacttctagaactcaacaaccttcattctctcatgtctgtggtatcagcattacaaagtgctcccatcttcaggctgacaaaaacctgggctcttttaaatcgaaaagacaagactacctttgagaaattggactacctgatgtcgaaagaagataattacaagcggacacgggaatatatccgaagcctgaagatggttccaagtattccctatctaggaatctatcttctggatttaatctacattgattctgcatatcctgcctcaggcagtatcatggaaaatgaacaaagatccaatcagatgaacaatattcttcgaataattgctgatttacaagtttcctgcagctatgatcacctcaccaccctgccccatgtgcagaagtacctgaagtccgtacgctacattgaagagctccagaagtttgtggaagacgacaactacaaactgtcgctcagaatcgaaccaggaagcagctctccaagactagtctcttccaaggaagatcttgcaggtccctctgctggctccggttctgcgaggttcagccggaggcccacctgtcctgacacatctgttgctggcagcctccccacacctccagtccccagacacaggaagagccacagcctaggcaacaatatgatgtgtcagttgagtgtagttgagagtaaaagtgcgacattcccatcggagaaagcaaggcacctactggacgacagtgtcctagagtcccgcagcccccgaaggggcctggctctgacctcctcctctgctgtcaccaatggactctccctaggcagtagtgagagctcagagtttagtgaagagatgtcttcagggctggaaagccccaccggcccgtgcatctgttctctggggaactccgcagctgtgcccaccatggaggggcctctgagaagaaaaaccctgctcaaggaagggcggaagcctgcgctgtcctcgtggaccaggtactgggtcatactctcaggatccaccctcctgtactacggagccaagtccttgcggggcacagacagaaaacactataaatccacacctggcaaaaaggtttccatcgtgggctggatggtgcagctgcccgatgaccccgagcacccagatatcttccagctgaacaaccctgacaaaggcaatgtttacaagtttcagactggttcccgatttcatgcaatactgtggcacaagcatttggatgatgcatgtaaaagcaacaggcctcaggtacctgcaaaccttatgtcatttgagtaagtctctgcaggacgtggcatgacttcagaggcttctgggaacccaggctgggcctggtggtgaagagcagtcctgggcacaggctgtgagccagggtgctgggaaactcacagctggactcaggggacacggcctgtggcctcaccatcccagagggcttcaccagtgtgggatccacctgtcagtccccagcgactctcatgacactcattctgcagcaccgcctcttggggcagtggtcagaccccacacgccctctctgggcccaccacctgcatctgcgactagagagcacccggcccacgttgggttctcagtgctttctactgcacagagtggacagcgctaactaacctgtgagaggggcccgagagaaggaacagctgtggaacaggctttttacaccccaagtgcatggggttgctcgcccacagggctgcctcagattttgtacaaccccgaagcgtcctctgcgtgtgcgtgctgtacgtgtgtgtgtgtgtgtgagcgagtgtgaactcttcaagaaacatgcattttggcacaagactcgtgacatcacacacttcattcgctttgaggccctgctttaaccttaagttatagccctgtccaccgaggaaggtcagggtgagagcctagattcctcctgtgtcaagggtccctcgcattcttttactgtaaacaaacaatgccttaaattgtgtcttgttttctgttcctatgggtgctattcatctggaaggcctgcttccaggcctctttgctgtcagcccttctgagacaggacctggcttcaggactgtggactgggctgctggcctgcttgcttcctcccttccccattcctagcagggcctgaggccctcctcttctcgcccttcccaccatgccagaatgggaagttgtgacgttgcagctccaaccgacgtgctcatagtgatcagctgtgcaggagccatgaggcaccaacctctccccgcagggcaaagcctgtgcccccatcatctcactcctttgcctgcactgccagggtggggcccaccaagattcctgatcatgacgggaagctgagtgaccctgaggccttaagcttccccagtcttggccccaaatgcagtcaccagcaagttttccattttccaagtccaagggcacaattgttgatgaccgtgtgacaatagagcgaagccccggggagtgaacggtccaacctctgcattcagttaggagctcttcacatgaatcacatccttatctgtcaccttgtgtcacattttaaagtgacttttattttgcacaaataatttttattcagaataataaatcactctttatcatagtatcttctcttccctcttcccctttagtttggatagcctaactctgagaagttaacccttaaacagttttctggaagagactgaatttctgggtccttgcagctgtgatggtttcagagctcagactgatcaggcatcaagctaccctcaagagtttctgggctggatgtttcagaacaacatctacaccagtaaagtgtaataggtcagtttcaaaacgaccaaaagacccaccactgtattttgaccaaataatgacaacttctttagaaatttgaatggcttggtgaggaaagtagttgtcaccagggcctcattttgtagttgagccttacaatgcttagtagttcatcttctttttgagcaaagactagaatactttcctcctaagagaaactcccaggtgataaaagttgatgccatcaaaccttgacaccgggtgctctgcacacccacgcggatgttgcacctcattctcccgatgactattcaaatcagcatctagaggctgaatgacaatgccaaacactccacctctgatcagaaccatgcagtgttaacactttaacctacattgaatctgattctacctgttaacttttaaaaagtcgtaagtttggatgaaagtgcaagatgtggaacatcaactacctattttccttgggtttttccactctgcaaactgtcctggtttttcacaccaatgaagtattatagatgccaatccaaaacctcagaatttcaggcaccacaaaaacaggtaattttctatcccttataagtttgtcttttctttcagaaacatctcttagcctaatttgaaatagcacaatcacaattcaaaatgtttagtcttctcactaattgagtctgcttccacgtcctctcccaggaacattcttagctcggactcttgaagaatctctttagattttgttggcaaaagccttatagaagcagtaagaggcttgaccacgccggaagagtcctggagctaaagctggaagacactcagctctctaagcaggggctcggccaaacatgggagttaagtgctgcttgtcttcccagtgttggtttgaaccctgtgagcctgagacagagagggccaggcaccaaccacaaggcgggaaagtccatgggtagaccctccccctggagggaagcatttctagtttttgctccttgactgtccagagtgtacaaatgttcataacgccattgaagggattatttcttgcatgcatatgctgaatttttttaagcaaatggatcatggcaccccaaaatgaaagttatagaaagctgtctacaactgtggagttggtagctggtaacattgttgtctcaagaacaactcacctctctccctaggactaatttttgtctctctcagttgaacatgttttgtcattcaagatcagtcaggtgcattctggcaactgacatacttgatggaggattgattcggtagagagcagtagaaatcttgttctaactgtgcctggtgagagactttggccccctccctccctataaggctgtggaacctgaggaagtagatacttgaagagattctgtttaggaagaaactcactctcttttgccagttgaatttatagagcattttttttcttaccaagatggccagtatcattttacccccacctcccaagccccaagaggtgtaccttttcagatgccattttacaggcggaaatgctccatgaaacaggaagccacttgcaagcaacatctgctctgttcctcaggtggggcccagagcccttccccgagactgctgatgtctgtaaccactggggagcactgccaaaaatacagctttctggtttgtgagcccataaatgacttaaatcagctttacatcatttttacatatcaagtggtttcatgttaaaaaacaaactcctagtcctttagaaataacagattctctgcacaaaaccacccattcattcatttattcattcacagcactagcaagtgctgcctatgctgagaacaagtcagatctgatccctgccctcatggacctgaccactcaacaaacagtccccaccacacctatctccttaggcaagactttgcctctctcctagtcctgagtataaatcctgtgcatagattcctctagaaaggcatcaaaaggctcaacagactgaatggcctcttggtctgcgaaaattcagttgcaatgaggatgaagtcactatcctagaggctgcttggcccagaagagccaggcacagagctgcagttgggcacgccaaggattccaaaggtggaatgagagagtagggtcaaactgtcacagtatctgctccataggtttctgtttttaatttcaatgttaaatacaactacaatatgagcgagaactgcattttcttgggtgttgagaacttgtaccatggacttcagaccgccttgcagccgtatgctgcacaagcgtgtacaccccctgggcagcctcaaaaccccgcttacagcagcaacacaggagatcatctgtccattttagaaccattaatctctttatccattgctgaacgactgtgactattcagtaacgaagtaatagtaattaattagtatggtataatctttaataaatttcgtgccaaaatgcatggttttccacttagcattcaaaatgttgcatagagagtagttttcaatttcttatgtactcttcaaagtaagttgaaaatcagtttctacattttaattcgtttcctgttaaatctgttgcactctcctgggctgtctttttctccagcagacccctgcatgcagttgtgtaaggactttctctaattcttgtgaatcgtctcacccgcagtaaccactgaacgtcaatcagccctccatggggttctttcgatttttggtgaagtattttgttacctcagtcttgtatcaagttgctgtatttttcagcttgttacattgataataattatttcactaattaaatactttaatgtacaaacatctttgtttactttgaaattaaatgtgttttccaatg

SEQ ID NO: 487 - DNA, 669 bp, Homo sapiens
ttttgcatcaacatttttattgaaatacaaaaagtgcaaacggtgaaatacatgattggtgccaaggaagtcattaagtgtgaatgtgaacactggattcacacagtacaagcacccgctccctggggtacagaccagtgggggacatgagaaagaccaaatagatccgaaaggctccccagtgaatggggctgtgagcgacacttgatacacaaaggagggcggagagcagagcagccctggccgaggctagagaccaagggactgatgaagaaccagcagcagcccaggccccagggggctggatgcactgctgatggtcttgggagagcccagcgaagttatgcccaggcccagcctggcttgcggatggggctgggctggtcagtgaggatccccacagtacgggctctggaatcatcctgcctggccaaggtcatgggggcagggtcactgcaggtacttccctgtactccccaaggacaaggctgcaggaagaagggatccccagaagggagtgtaattctacgagacatgggagttgagatcagccatcactggccccgaggttctttgaaagacacaaggcttgccggccgcagtggcttacgcctggaatccaagcctttgggagcccaggtgggtggatcatgaaggttcggaaatcga

SEQ ID NO: 488 - DNA, 3311 bp, Homo sapiens
gcgagcgggggcgcgggtggcgcggcgggacgcgagcggcgagccggagcgcgagcccgctcccgcaccatggaggaggacgacagctacgttcccagtgacctgacagcagaggagcgtcaagaactggagaacatccgacggagaaaacaggagctgctggctgacattcagaggctgaaggatgagatagcagaagtagctaatgaaattgaaaacctgggatccacagaggaaaggaaaaacatgcagaggaacaaacaggtagccatgggcaggaaaaaatttaatatggaccctaaaaaggggatccagttcttaatagagaacgacctcctgaagaacacttgtgaagacattgcccagttcttatataaaggcgaagggctcaacaagacagccatcggcgactacctaggggagagagatgagtttaatatccaggttcttcatgcatttgtggagctgcatgagttcactgatcttaatctcgtccaggcactacggcagttcctgtggagcttccggctacccggagaggcccagaagatcgaccggatgatggaggcgtttgcccagcgatattgtcagtgcaataatggcgtgttccagtccacggatacttgttacgtcctctcctttgccatcatcatgttgaacaccagtctgcacaaccccaatgtcaaagataagcccactgtggagaggttcattgccatgaaccgaggcatcaatgatgggggagacctgccggaggagctcctccggaatctctatgagagcataaaaaatgaaccctttaaaatcccagaagacgacgggaatgacctcactcacactttcttcaatccagaccgagaaggctggctattgaaactcggaggtggcagggtaaagacttggaagagacgctggttcattctgactgacaactgcctttactactttgagtataccacggataaggagccccgtggaatcatccctttagagaatctgagtatccgggaagtggaggactccaaaaaaccaaactgctttgagctttatatccccgacaataaagaccaagttatcaaggcctgcaagaccgaggctgacgggcgggtggtggaggggaaccacactgtttaccggatctcagctccgacgcccgaggagaaggaggagtggattaagtgcattaaagcagccatcagcagggaccctttctacgaaatgctcgcagcacggaaaaagaaggtctcctccacgaagcgacactgagcgtgcagccaagggcgttggtctgcgggggccttggagctcctgctcttctcccgcacctccatggatgcactgctgccgagcagagcgtcctctgccaggccccgccctggattcctagagactagcttcagcttttgctattttttttaagtgggagaagggtgggcagttatcactggggaagagaggaccggccacctgtccagcatgggctccagagccttcctctctcacagggcagagctcttgtcggcagggcagcctcctggccagtttctctgctcagtgttctggtagcagagctcagagccaactgtttacctcttggttgtccccgtgaagaagccttcaaaccctgcaccataaatacatgtgtccatatattattatatgttaagagaaaaaggtggaaaggaagagaagccacatactataaagatctattttttttttttaagagagaacgtagggctgttcaggtgcattctgccctggctgcgctggggagcttctccctggagaagagcacctggggctgcggccaaggggcatcagcctgggcccgcggcagggcctggcctgcctctcctgtgctgtgggagctcgctgcctggtgcttgtcttggcgagatggacaggtgaggtcgaggacgcagagggcagaggcccagtggagcctcagacggcacagtcagagtcgggggcctgcctggccggggtcgcagtcggcagcagcgtgcagtccggcatctcccgcggatgcttttccatcccaagtgcctgcggagcccgaggagaggagagagctgactggacgcttacgttattttcctccttcagaatccaagttcttgttgggctttaaagtagaaagtcagcattttccttgagctaaatacctaataaccaaaactgtgaggaaggttatcgggacagaggttccggataacctgtttcattttgggttttcttcctcttccccagactccagtcctcgttctagaggaaggagtaggacttccccgatccccgtagcttcagctttttctgcctcaaaaccagccctaactggactactctggatgcattttgtggtgggccccctagagggaagatgggcctttatctgctccgtggggtgcactggagtgaggggggtggccgggctgcctctcgcatctctgtcttcccctgcaggcgctgtgtgagctggccctgcccctcctcattacagtatgaagggagccgtgacacgcagcattttcctgccgttctctcagggactctcagggcagctcctgccactccgccagggccagcatgccagtccaggcagagcaggtggctggctgtctggccgtctcgccccgcccctccacaggaccctggaccagggcggtgcagggcgcagccccgaggaggcaggtggaggagctgcgggttttcacagggccgcgtcgccacggctcctctgatcctttagggttggcgagcatctctggaaatagcttttgcagaggagtggtgggaggaatagagggggacagtctgtcacctccctccccgccactttgtgtagatcctacctggagggaatggctttaggcacttttgtgccagagcttgtgagggtgacagaagagggtccaggctggaaacctgaactttctgggtgggagaaccaggtggtgcctgccgaggtctgggcgtgtttgggccggtgctggagcctgtccagctggcccgggccctggcctggttctcaagtgtttcctagacagagaggcacctgggtcagtattagtctatttatcagaggtgtaaataatctatgtatagtttttctccttttagattattttgtatttgtttaaaagaagttttgtcaaaatacaaaaatataaagaaatgactgaaagttgttgacagggtttttaagaaataattattctaattgtttttgtttgtttgtttttgccttgtaaactagcgccaaggaactgcagcaaataaactccaactctgcccaagcaaaaaaaaaa

SEQ ID NO: 489 - DNA, 2784 bp, Homo sapiens
accaaaccgtcctctacagcctcctggccccggcgcaggctgcccgtactgcccgtggcatgagggagccggaagagctgatgcccgattcgggtgctgtgtttacatttgggaaaagtaaatttgctgaaaataatcccggtaaattctggtttaaaaatgatgtccctgtacatctttcatgtggagatgaacattctgctgttgttaccggaaataataaactttacatgtttggcagtaacaactggggtcagttaggattaggatcaaagtcagccatcagcaagccaacatgtgtcaaagctctaaaacctgaaaaagtgaaattagctgcctgtggaaggaaccacaccctggtgtcaacagaaggaggcaatgtatatgcaactggtggaaataatgaaggacagttggggcttggtgacaccgaagaaagaaacacttttcatgtaattagcttttttacatccgagcataagattaagcagctgtctgctggatctaatacttcagctgccctaactgaggatggaagactttttatgtggggtgacaattccgaagggcaaattggtttaaaaaatgtaagtaatgtctgtgtccctcagcaagtgaccattgggaaacctgtctcctggatctcttgtggatattaccattcagcttttgtaacaacagatggtgagctatatgtgtttggagaacctgagaatgggaagttaggtcttcccaatcagctcctgggcaatcacagaacaccccagctggtgtctgaaattccggagaaggtgatccaagtagcctgtggtggagagcatactgtggttctcacggagaatgctgtgtatacctttgggctgggacaatttggtcagctgggtcttggcacttttctttttgaaacttcagaacccaaagtcattgagaatattagggatcaaacaataagttatatttcttgtggagaaaatcacacagctttgataacagatatcggccttatgtatacttttggagatggtcgccacggaaaattaggacttggactggagaattttaccaatcacttcattcctactttgtgctctaattttttgaggtttatagttaaattggttgcttgtggtggatgtcacatggtagtttttgctgctcctcatcgtggtgtggcaaaagaaattgaattcgatgaaataaatgatacttgcttatctgtggcgacttttctgccgtatagcagtttaacctcaggaaatgtactgcagaggactctatcagcacgtatgcggcgaagagagagggagaggtctccagattctttttcaatgaggagaacactacctccaatagaagggactcttggcctttctgcttgttttctccccaattcagtctttccacgatgttctgagagaaacctccaagagagtgtcttatctgaacaggacctcatgcagccagaggaaccagattatttgctagatgaaatgaccaaagaagcagagatagataattcttcaactgtagaaagccttggagaaactactgatatcttaaacatgacacacatcatgagcctgaattccaatgaaaagtcattaaaattatcaccagttcagaaacaaaagaaacaacaaacaattggggaactgacgcaggatacagctcttactgaaaacgatgatagtgatgaatatgaagaaatgtcagaaatgaaagaagggaaagcatgtaaacaacatgtgtcacaagggattttcatgacgcagccagctacgactatcgaagcattttcagatgaggaagtagagatcccagaggagaaggaaggagcagaggattcaaaaggaaatggaatagaggagcaagaggtagaagcaaatgaggaaaatgtgaaggtgcatggaggaagaaaggagaaaacagagatcctatcagatgaccttacagacaaagcagaggatcatgaattttctaaaactgaggaactaaaactagaagatgtggatgaggaaattaatgctgaaaatgtggaaagcaagaagaaaactgtgggagatgatgaaagtgttcctacaggttatcacagtaaaacagaaggagcagaaagaaccaatgatgatagctcagctgaaactattgaaaagaaagaaaaagccaacctagaggaacgggccatttgtgagtacaatgaaaacccaaaaggatacatgcttgatgatgcagatagcagttcattagaaatcctagaaaacagtgaaacaacaccaagcaaagacatgaaaaaaacaaagaagatttttctgttcaaaagagtcccctcaataaatcaaaagattgtcaagaataacaatgagccgctcccagagataaaatccataggagaccagatcattttaaaaagtgataataaagatgccgaccagaaccacatgagtcagaatcatcagaatatcccaccaacaaatacagagagaagatcaaaatcctgtacaatactataaatatatatttatgttttcacagtcaccaagtgtattgtaatgtatacttgaaaaatgttataacttatgaagtaaagtttctgatagtagtctttaaaagatataagacttaatatgttttattcagcttctataagtgtgaccagttttgatatttatttatgctaatatttttaacaagtcatttcaaaatatgtgtatctcaaattctccctaaagtgttgtggccttaactgttcagtattgcaataaaaaatatatttttatatgtggaaaa

SEQ ID NO: 490 - DNA, 2018 bp, Homo sapiens
ccgggtccaaaacctccatccggagccggcaggagaggagaacgatgtttaactcggtcaacctgggcaacttctgctcgccgtcgcgcaaggagaggggcgcagatttcggcgagcgagggagctgcgcctccaacctctatctgcccagttgcacttactacatgcccgagttctccacggtctcctccttcctgccccaggccccctctcgtcagatctcctatccctactcggcccaagtgcccccggtccgggaggtctcctacggcctggagccatccggcaagtggcaccatcggaacagctactcctcctgctatgcggcggccgacgagcttatgcaccgggagtgcctgcctccttccaccgtcaccgagatcctcatgaaaaacgaaggctcctacggcggccaccaccaccccagcgccccgcacgcaacccccgccggcttctactcctcagtcaacaagaacagcgtcctgcctcaagccttcgaccgtttcttcgacaacgcctactgcggtggcggcgacccgcccgccgagcccccctgctccggcaagggcgaggccaagggggagcccgaggcacccccggcctcgggactggcgtcccgggctgaggcgggtgccgaggcggaggctgaggaggagaacacaaatcccagctcgtccggttcagcccactccgtggccaaggagccggccaaaggagccgcccccaacgccccccgcacccgcaagaagcgctgcccttattcgaaattccagatccgggaactggagcgagagtttttcttcaacgtgtatatcaacaaagagaagcggctgcagctgtcccggatgctgaacctgacggaccgacaagtgaaaatttggtttcagaacagaaggatgaaagaaaagaaactgagcagagaccggctgcagtatttctcgggaaatcctctgctgtaacctgcagaccgggcccttttgggggcggggggaggggaaaattattttattttatttttattttttattttctaactcgtcttctttccgccggtggaaaactggactgtggccagggctggcccccaccgctgtggccggcactccattccggaacctcctggaccctctatctgactctcgctgtgggacagggaccgggcctggaaagggggtgaagggaagtgtctgatgcacggcgagtgaacaccgttggcgccgaggccaagactttgatttaaaagaaaacacacctcggcgacaatgtcttgctgctcggattaggtgggggaggggcgacagtagtgagcgcgcctgagccgaacaatcctcgaactaaaagccttcccttgcccatgtgaaaagatccgctaagacagatgtctgccagcggaaacttctcgagctcccccctctaccccgccccaccttgccccactactttagggggcagctaaatgtgatcctgccttgctgtgaaatttctgtaccttcaacctggtgttaggtgtgcaaagtccgtgtcctacctccgtcttcgccaaggccccgcccgagcctagttgttctccccctgaatgtgtagaaccttcctttgaaatttcttaatcggtgcattgaggtttccacatctttttccaaagcagtgcccacttcatggatttatagctatagtctatgcagtcgttacctctttttttttttttttaagaaaattgaagattggggtggtggaggcagtagggagatgggattgggcacctcccccgtgctggggcctggatttttgtaaataaatttcccaagcgtttctttccacctggagggaaagggggggacgcccccagtgagattcaaatcacgcatctctactcctctgcgtgagtgcgtgtgtacatgtgcactccccaccctgctcccttcccagagggattgctgtgaaatttttttggtggcaaataaagataaatttcattctgttcaaaaaaaaaaaaaaaaaaaaaaaaaaaaaaaaaaaaa

SEQ ID NO: 491 - DNA, 1687 bp, Homo sapiens
cgggcgcgcggggagggggcgcaggaagcgggcgaggccgggcgcgggaggcggcggcggccccgggagctgccgatcggcgccgggacaaaggcgcggccgcccggcgcccccagcagcccgagccggggcgcacagccggggcgcagcccgcgccccccgccgcgattgacatgatgtttccacaaagcaggcattcgggctcctcgcacctaccccagcaactcaaattcaccacctcggactcctgcgaccgcatcaaagacgaatttcagctactgcaagctcagtaccacagcctcaagctcgaatgtgacaagttggccagtgagaagtcagagatgcagcgtcactatgtgatgtactacgagatgtcctacggcttgaacatcgagatgcacaaacaggctgagatcgtcaaaaggctgaacgggatttgtgcccaggtcctgccctacctctcccaagagcaccagcagcaggtcttgggagccattgagagggccaagcaggtcaccgctcccgagctgaactctatcatccgacagcagctccaagcccaccagctgtcccagctgcaggccctggccctgcccttgaccccactacccgtggggctgcagccgccttcgctgccggcggtcagcgcaggcaccggcctcctctcgctgtccgcgctgggttcccaggcccacctctccaaggaagacaagaacgggcacgatggtgacacccaccaggaggatgatggcgagaagtcggattagcagggggccgggacagggaggttgggaggggggacagaggggagacagaggcacggagagaaaggaatgtttagcacaagacacagcggagctcgggattggctaaactcccatagtatttatggtggccgccggcgggggccccagcccagcttgcaggccacctctagctttcttcctaccccattcccggcttccctcctcctcccctgcagcctggttaggtggatacctgccctgacatgtgaggcaagctaaggcctggagggtcagatgggagaccaggtcccaagggagcaagacctcgcgaagcgcagcagccccggcccttcccccgttttgaacatgtgtaaccgacagtctgcctgggccacagccctctcaccctggtactgcatgcacgcaatgctagctgcccctttcccgtcctgggcaccccgagtctcccccgaccccgggtcccaggtatgctcccacctccacctgccccactcaccacctctgctagttccagacacctccacgcccacctggtcctctcccatcgcccacaaaagggggggcacgagggacgagcttagctgagctgggaggagcagggtgagggtgggcgacccaggattccccctccccttcccaaataaagatgagggtactaaagttgtcttggtttttattttattattatttttttctttttccagtatactagcttgtcttttaagaaaggggatattaaaaaaaaaaaaagacaaaagtgtttttaaaaaaaagcaacacccacacctgtgtctgtatatagtcagcttatctcgtgttcaatcgtctgatctctacagagagaagtggaaaatgctgtatcaagggtgggcttagctgtgcctttccaataaagatgtgagaagcttcaaaaaaaaaaa

SEQ ID NO: 492 - DNA, 2439 bp, Homo sapiens
gcagccgccaccgccgccgccgccgccaccagagccgccctgtccgcgccgcgcctcggcagccggaacagggccgccgtcggggagccccaacacacggtccacagctcatcatgatggacttggagctgccgccgccgggactcccgtcccagcaggacatggatttgattgacatactttggaggcaagatatagatcttggagtaagtcgagaagtatttgacttcagtcagcgacggaaagagtatgagctggaaaaacagaaaaaacttgaaaaggaaagacaagaacaactccaaaaggagcaagagaaagcctttttcgctcagttacaactagatgaagagacaggtgaatttctcccaattcagccagcccagcacatccagtcagaaaccagtggatctgccaactactcccaggttgcccacattcccaaatcagatgctttgtactttgatgactgcatgcagcttttggcgcagacattcccgtttgtagatgacaatgaggtttcttcggctacgtttcagtcacttgttcctgatattcccggtcacatcgagagcccagtcttcattgctactaatcaggctcagtcacctgaaacttctgttgctcaggtagcccctgttgatttagacggtatgcaacaggacattgagcaagtttgggaggagctattatccattcctgagttacagtgtcttaatattgaaaatgacaagctggttgagactaccatggttccaagtccagaagccaaactgacagaagttgacaattatcatttttactcatctataccctcaatggaaaaagaagtaggtaactgtagtccacattttcttaatgcttttgaggattccttcagcagcatcctctccacagaagaccccaaccagttgacagtgaactcattaaattcagatgccacagtcaacacagattttggtgatgaattttattctgctttcatagctgagcccagtatcagcaacagcatgccctcacctgctactttaagccattcactctctgaacttctaaatgggcccattgatgtttctgatctatcactttgcaaagctttcaaccaaaaccaccctgaaagcacagcagaattcaatgattctgactccggcatttcactaaacacaagtcccagtgtggcatcaccagaacactcagtggaatcttccagctatggagacacactacttggcctcagtgattctgaagtggaagagctagatagtgcccctggaagtgtcaaacagaatggtcctaaaacaccagtacattcttctggggatatggtacaacccttgtcaccatctcaggggcagagcactcacgtgcatgatgcccaatgtgagaacacaccagagaaagaattgcctgtaagtcctggtcatcggaaaaccccattcacaaaagacaaacattcaagccgcttggaggctcatctcacaagagatgaacttagggcaaaagctctccatatcccattccctgtagaaaaaatcattaacctccctgttgttgacttcaacgaaatgatgtccaaagagcagttcaatgaagctcaacttgcattaattcgggatatacgtaggaggggtaagaataaagtggctgctcagaattgcagaaaaagaaaactggaaaatatagtagaactagagcaagatttagatcatttgaaagatgaaaaagaaaaattgctcaaagaaaaaggagaaaatgacaaaagccttcacctactgaaaaaacaactcagcaccttatatctcgaagttttcagcatgctacgtgatgaagatggaaaaccttattctcctagtgaatactccctgcagcaaacaagagatggcaatgttttccttgttcccaaaagtaagaagccagatgttaagaaaaactagatttaggaggatttgaccttttctgagctagtttttttgtactattatactaaaagctcctactgtgatgtgaaatgctcatactttataagtaattctatgcaaaatcatagccaaaactagtatagaaaataatacgaaactttaaaaagcattggagtgtcagtatgttgaatcagtagtttcactttaactgtaaacaatttcttaggacaccatttgggctagtttctgtgtaagtgtaaatactacaaaaacttatttatactgttcttatgtcatttgttatattcatagatttatatgatgatatgacatctggctaaaaagaaattattgcaaaactaaccactatgtacttttttataaatactgtatggacaaaaaatggcattttttatattaaattgtttagctctggcaaaaaaaaaaaattttaagagctggtactaataaaggattattatgactgttaaaaaaaaaaaaaaaaaaaaaaaaaaaaaaaaaa

SEQ ID NO: 493 - DNA, 1611 bp, Homo sapiens
acataatttctggagccctgtaccaacgtgtggccacatattctgtcaggaaccctgtgtgatcatggtctggatctgcaacacgggccaggccaaagtcacagatcttgagatcacaggtggtgttgagcagcaggcaggcaggcaatcggtccgagtggctgtcggctcttcagctctccgctcggcgtcttccttcctctcccggtcagcgtcggcggctgcaccggcggcgggcagtcctgcgggaggggcgacaagagctgaggcgcggccgccgagcgtcgagctcagcgcggcggaggcggcggcggcccggcagccaacatggcggcggcggcggcggcgggcgcgggcccggagatggtccgcgggcaggtgttcgacgtggggccgcgctacaccaacctctcgtacatcggcgagggcgcctacggcatggtgtgctctgcttatgataatgtcaacaaagttcgagtagctatcaagaaaatcagcccctttgagcaccagacctactgccagagaaccctgagggagataaaaatcttactgcgcttcagacatgagaacatcattggaatcaatgacattattcgagcaccaaccatcgagcaaatgaaagatgtatatatagtacaggacctcatggaaacagatctttacaagctcttgaagacacaacacctcagcaatgaccatatctgctattttctctaccagatcctcagagggttaaaatatatccattcagctaacgttctgcaccgtgacctcaagccttccaacctgctgctcaacaccacctgtgatctcaagatctgtgactttggcctggcccgtgttgcagatccagaccatgatcacacagggttcctgacagaatatgtggccacacgttggtacagggctccagaaattatgttgaattccaagggctacaccaagtccattgatatttggtctgtaggctgcattctggcagaaatgctttccaacaggcccatctttccagggaagcattatcttgaccagctgaatcacattttgggtattcttggatccccatcacaagaagacctgaattgtataataaatttaaaagctaggaactatttgctttctcttccacacaaaaataaggtgccatggaacaggctgttcccaaatgctgactccaaagctctggacttattggacaaaatgttgacattcaacccacacaagaggattgaagtagaacaggctctggcccacccatatctggagcagtattacgacccgagtgacgagcccatcgccgaagcaccattcaagttcgacatggaattggatgacttgcctaaggaaaagctaaaagaactaatttttgaagagactgctagattccagccaggatacagatcttaaatttgtcaggacaagggctcagaggactggacgtgctcagacatcggtgttcttcttcccagttcttgacccctggtcctgtctccagcccgtcttggcttatccactttgactcctttgagccgtttggaggggcggtttctggtagttgtggcttttatgctttcaaagaatttcttcagtccagagaattcactggcc

SEQ ID NO: 494 - DNA, 1274 bp, Homo sapiens
cagcgggagacggccacgagattcccccatctctttgaatataattttagattgagattcagattaaatccgaggggaaaacactttatgaggctgaaagctgtgtcgttgccagagacagggttatgagctatcaaatgcaattacattaagacagattatactgggcaaattgagccatttagaaggtgagaatcaaagaaacggctctgatcctcttttcccccttctctctccctctccctctctctctaaattgcagttcgtagttccttccaattcggaggcacaaaagtaggtgagactgcttttgtatctgcgaagtgcttcactcctgaatgtaattctagctgagtgcaatctaggttaagagccggacaagcgggtaattagagcccgctagctgcccgaggaccggccgccccgccaaagcgcgccccgagtcggcgcccttctcccggccgagcctagctgcggctggacacggagcgcccgagatgatggtgctggacaaggaggacggcgtgccgatgctctccgtccagcccaaagggaagcagaagggctgtgcgggctgtaaccgcaagatcaaggaccgctatctgctgaaggcattggacaagtactggcacgaagactgcctcaagtgtgcgtgctgtgactgccgcctgggcgaggtgggctccaccctctacaccaaggccaacctcatcctgtgccgacgcgactacctgaggctctttggcaccacagggaactgtgctgcttgcagcaagctgatcccagccttcgagatggtgatgcgggcccgggacaacgtgtatcacctcgactgcttcgcctgccagctctgcaaccagagattttgtgtgggagacaaattcttcctgaagaacaacatgatcttgtgtcagatggactatgaggaagggcagctcaatggcacctttgaatcccaagttcagtaacgcccggcgcctggcctccaggcccgtctgtccatctgcccgcctgcccacctgcctggccggccagccagccactctaccagtgcaggctggccagccgctctcctgccacattagaacttctccgtcctcgatgggagggatggcccttcctcctccaccaccgcccgtctgtgtgtgacccctcctggggccaggccgggcctgtacagtctgtcttctgtatataaatgggaacatttattttatgagaaatgtaatgcgattttattactggcgtggattaaacttatgaatgtttccggg

SEQ ID NO: 495 - DNA, 2768 bp, Homo sapiens
ccgaggcgctccctgggatcacatggtacctgctccagtgccgcgtgcggcccgggaaccctgggctgctggcgcctgcgcagagccctctgtcccagggaaaggctcgggcaaaaggcggctgagattggcagagtgaaatattactgccgagggaacgtagcagggcacacgtctcgcctctttgcgactcggtgccccgtttctccccatcacctacttacttcctggttgcaacctctcttcctctgggacttttgcaccgggagctccagattcgctaccccgcagcgctgcggagccggcaggcagaggcaccccgtacactgcagagacccgaccctccttgctaccttctagccagaactactgcaggctgattccccctacacactctctctgctcttcccatgcaaagcagaactccgttgcctcaacgtccaacccttctgcagggctgcagtccggccaccccaagaccttgctgcagggtgcttcggatcctgatcgtgagtcgcggggtccactccccgcccttagccagtgcccagggggcaacagcggcgatcgcaacctctagtttgagtcaaggtccagtttgaatgaccgctctcagctggtgaagacatgacgaccctggactccaacaacaacacaggtggcgtcatcacctacattggctccagtggctcctccccaagccgcaccagccctgaatccctctatagtgacaactccaatggcagcttccagtccctgacccaaggctgtcccacctacttcccaccatcccccactggctccctcacccaagacccggctcgctcctttgggagcattccacccagcctgagtgatgacggctccccttcttcctcatcttcctcgtcgtcatcctcctcctccttctataatgggagcccccctgggagtctacaagtggccatggaggacagcagccgagtgtcccccagcaagagcaccagcaacatcaccaagctgaatggcatggtgttactgtgtaaagtgtgtggggacgttgcctcgggcttccactacggtgtgcacgcctgcgagggctgcaagggctttttccgtcggagcatccagcagaacatccagtacaaaaggtgtctgaagaatgagaattgctccatcgtccgcatcaatcgcaaccgctgccagcaatgtcgcttcaagaagtgtctctctgtgggcatgtctcgagacgctgtgcgttttgggcgcatccccaaacgagagaagcagcggatgcttgctgagatgcagagtgccatgaacctggccaacaaccagttgagcagccagtgcccgctggagacttcacccacccagcaccccaccccaggccccatgggcccctcgccaccccctgctccggtcccctcacccctggtgggcttctcccagtttccacaacagctgacgcctcccagatccccaagccctgagcccacagtggaggatgtgatatcccaggtggcccgggcccatcgagagatcttcacctacgcccatgacaagctgggcagctcacctggcaacttcaatgccaaccatgcatcaggtagccctccagccaccaccccacatcgctgggaaaatcagggctgcccacctgcccccaatgacaacaacaccttggctgcccagcgtcataacgaggccctaaatggtctgcgccaggctccctcctcctaccctcccacctggcctcctggccctgcacaccacagctgccaccagtccaacagcaacgggcaccgtctatgccccacccacgtgtatgcagccccagaaggcaaggcacctgccaacagtccccggcagggcaactcaaagaatgttctgctggcatgtcctatgaacatgtacccgcatggacgcagtgggcgaacggtgcaggagatctgggaggatttctccatgagcttcacgcccgctgtgcgggaggtggtagagtttgccaaacacatcccgggcttccgtgacctttctcagcatgaccaagtcaccctgcttaaggctggcacctttgaggtgctgatggtgcgctttgcttcgttgttcaacgtgaaggaccagacagtgatgttcctaagccgcaccacctacagcctgcaggagcttggtgccatgggcatgggagacctgctcagtgccatgttcgacttcagcgagaagctcaactccctggcgcttaccgaggaggagctgggcctcttcaccgcggtggtgcttgtctctgcagaccgctcgggcatggagaattccgcttcggtggagcagctccaggagacgctgctgcgggctcttcgggctctggtgctgaagaaccggcccttggagacttcccgcttcaccaagctgctgctcaagctgccggacctgcggaccctgaacaacatgcattccgagaagctgctgtccttccgggtggacgcccagtgacccgcccggccggccttctgccgctgcccccttgtacagaatcgaactctgcacttctctctcctttacgagacgaaaaggaaaagcaaaccagaatcttatttatattgttataaaatattccaagatgagcctctggccccctgagccttcttgtaaatacctgcctccctcccccatcaccgaacttcccctcctcccctatttaaaccactctgtctcccccacaaccctcccctggccctctgatttgttctgttcctgtctcaaatccaatagttcacagctgagctggg

SEQ ID NO: 496 - DNA, 2298 bp, Homo sapiens; identical to SEQ ID NO: 16

SEQ ID NO: 497 - DNA, 2279 bp, Homo sapiens
gtggttctagggcaggcgggcgggtttgagagggcggggattgcgactctcacaccctgagctccggtgctcctttcctaactccactggctgcggcatctgtgggaaaagtgtggctgggtcttcgaggagccgcaccaatggcttccgtgctgtcctacgaaagcctggtccacgccgtggccggagccgtgggaagcgtgacagcaatgacagtgttttttcccctggatacagctagacttcgacttcaggttgatgagaaaagaaaatccaaaactacacacatggtgctcctggagatcattaaagaagaaggactcctggcaccatatcgagggtggtttccagtgatttccagtctctgctgctccaattttgtctatttctacacttttaatagcctcaaagcactctgggtcaaaggtcaacattctaccactggaaaagatctggtagttgggtttgttgcaggagtggttaatgtgttgctaacaactccactctgggtggtaaacaccagactgaagcttcaaggagcaaaatttaggaatgaagacattgtaccaacaaactacaaaggtatcattgatgcttttcatcagatcattcgcgatgaaggaatctcggctttatggaatggcacatttccctcattgctgttggtcttcaatcctgccatccagttcatgttttatgaaggtttaaaacggcagcttttaaagaaacggatgaagctttcttccttggatgtgttcatcattggtgcagtagccaaagcgattgccaccacggtgacctatcccctgcagacggtacagtcaattctgaggtttgggcgtcatagactaaacccagaaaacagaacattgggaagtcttcggaatattctctatcttcttcaccaacgagtaagacgttttggaataatgggactctacaaaggccttgaagccaaactgctgcagacagtcctcactgctgctctcatgttccttgtttatgagaaactgacagctgccaccttcacagttatggggctgaagcgtgcacaccaacactgagacgccttcccatgaaaaattccgaagatgctcaagagggaggtttcctcctgagtgaagagaagtgattctcccttgactctggctcctgccaccacaaatgttaccctcattggcttgaaaagcatccaagggtgcacagggagtatggccaactggacctgttgtcaccttaattgtcatgctggctggttggattttggggtggcagttggactaatgtgaaaaaaacattgctgaaaacctaaaaatgaaagtttgtgagtgtttattggttttcttaagagaaatggactattttgctctcatgtgtaatgttttctatttaaatctttcttaaatataccagctgttctctttccctgaactctcccccaggttctaggacaaatttaataacatgtaattctcctcaaatacttttgtatgtctcagtgttggtgttttcctccctaaaactaacattagggctgtgccacgggcatgactttatttttgttgggcttttttttccctgcttaaggagaggtgtcttttttggatatgagctatttattttgtgaaatgaaaattgttcacccaaatgattctcttataaactatttgtaaatgtcacttattcattagtgtttgacataatttttagaatatttattttgaatcaatcctttcattacgaaagacttgaagttttgtgtccattcttacaagccctggtcagtcaagtcccaataaatggtcagcacaaaaaagatattcttgaaaattgctctttattaaggtattacgttgagtttgcaaccagatgggaaaaatcacaaaaatgagaaggggagcagatatcttgttgaggtctggatattatctccctttataaacttggtgtaggccgtatattttgaaaataaacatctggttgaggttatttcatttggaaaccttccttagagtcctgttgctcagtgtggtccatcagacggtagtactgccacaagctgagagcttgctgggcacgcaacccagagtttctgaatcctgttccgtattttaacattcccaggtgattcacagccacattaaagttcaggagaccataggacccctgacccatgagaagaagtgattggtttcgattatagacatcaagataaagatttttctcaaaggaaagagattaatgtattaaaacaacctctgaaaaaaaaaaaaaaaaaa

SEQ ID NO: 498 - DNA, 2578 bp, Homo sapiens
agagaaccgtggctggcaaagatgattcaggcgattctggttttcaacaaccatgggaagccacggctagtccgcttctaccagcgtttcccagaagaaattcaacagcagattgttcgagagactttccatctagtcctcaagcgggatgacaacatctgtaacttcttggagggtggaagtttgattggtggctctgactacaaactgatctaccggcactatgctaccctctactttgtattttgtgtggattcctcagagagtgaacttggaatcttggacctcatccaggtttttgtggaaactctggataagtgtttcgaaaatgtgtgtgaattggatttgatcttccatatggataaggtgcactacatcctccaggaggtggtgatgggtgggatggtgttggaaacaaacatgaatgaaatcgtggctcagattgaggctcaaaacaggctggagaaatccgagggtggcctttcagcagcccctgcgcgggctgtgtctgctgtgaaaaacatcaacctgccagagattcctcggaacatcaacattggcgatctcaacatcaaagttcccaacctgtcccagtttgtctgaggatcaagtattggcctgaaatagagtccttaagacaagcaaagacaagcaaggcaagcacgtctggaaacagaacccattttgagccttagaagagtcaagcctcaggacctggaaactttgtgtctggggaagactgtttggcatggaatagggaagggattcctattgacactgctcgggtgcacccagttctcacatgtgcagtcatgccgttctctgatgcatacggccactgcagatgtgaggggccctgccttcctcagtagggagtcaacatgcccaagtcatttgcacctttacctctcacatggatgctcccaagggttagggactgcattgagcaggcccacctgcttcccagaacctcctcactagggctgagcaccttctctgagtagagtcttcatccttagcaccacagacttctgaggtcctgtgccctttacttgctggtgaggtgtcataggtagaaaagggctggcccttcagatctgggggtgtggtgagtggcaagtaagggcagaattttaggagaaccagagtcacccgctggctctactgagattgttacacccagaatccttttgtgtttttttgtggtttttttttttgaggtggagtcttgctctgtcacccaggctggagtgctgtggtgcaatctcggctcactgcaacctctgcttcccgggttcaagcatttctcctgtctcagcctccccagtagctgggattacaggcacccaccaccatgcccagctaattgttgtatgtttagtagagacagggtttcaccatgttggccaggctgggcccgaactcctggacctcaagtgatctacccgccttggcctcccaaagtgctggcattacaggtgtgagccaccgtgcccggccaccagaatcctttggtatagccaagccttttggttaccgcctcatgaagaatatgcttcccgcattgtcctagtcccagttgtattctcacaggtgttatgtgcaggacacaatccaaatcataaacctggctcatgcccaacacatttctgctaatagggagagggacccaccacacacccacacatgccagaggtccctcctcacagaggagagggcctgtgtctgtagaaggttaaagctgacaacatgtgaaacatcccagaattatgactcttcccaagtttaaaatacattctcctcatgagagcagaaggtttgttgctgtgttgtgaatgatgagctgcctccatagggaacccactgccacctgggccagcttctggagcatgagaacctgagccagggtcacccttgtggggcctggacatgacgcacgctggctgcgactaggagcagggctgcctcttctccctccccaaggtctgcttgtgggcacgctctgttccctcaggtgccattctcccagggcttaggcgcccataaatgttctttctgtggtggagtagggcctcctgcttccatactgtcgcatgggctagatctcaggtgtggtgttgagccaccttaagatgagggctgcttcgcagtaaagtttccagcctgggcccctcttgggccttctggctggggaccctcagcctcctgatgctgttgcagggcaggtctgagagggtgcccagcagcacccggtgtcagggccaccttgttttccatttttgaacagcgctccctgtggtttgtgcccactgctcaatacagcctccgatcctcactcttgaaagctccatgataagcacagagatgggcagtgtgggtcagaaggtgggccgcttcctgtggaagagggaagtgtaggtgaatagatatcaaaacccctgatgtcattcttttgaggggttggattttcttttttctggcagacatttcagtacattcacatttctctcacatttgctgaatgtgagatcagaataaaggagatcggcgtttatttcgtaaaaaaaaaaaaaaaaaa

SEQ ID NO: 499 - DNA, 666 bp, Homo sapiens
gatcccggtgccagggaccctgcccagttccaggcgtcgcctaacccagaaacgactgggcgccgcgtcctggaaaggccccagcgcacggacatctgaggagctgtttccgttcctctgcccgccatgccgttcctggagctggacacgaatttgcccgccaaccgagtgcccgcggggctggagaaacgactctgcgccgccgctgcctccatcctgggcaaacctgcggaccgcgtgaacgtgacggtacggccgggcctggccatggcgctgagcgggtccaccgagccctgcgcgcagctgtccatctcctccatcggcgtagtgggcaccgcggaggacaaccgcagccacagcgcccacttctttgagtttctcaccaaggagctagccctgggccaggaccggatacttatccgctttttccccttggagtcctggcagattggcaagatagggacggtcatgacttttttatgattgggcacggagggatccagggcatctgtgaactggctgcttcttccagagagatctcttggcagagtgagggcctggagataaccagctttggattatcccgcatgcaacattcctgtgatcacataatcctcttcttcatcctcatatgaaataaatgaagagagcttcctcattcaaaaa

SEQ ID NO: 500 - DNA, 3300 bp, Homo sapiens
cttccggcgagcgggcaagcgggaaccaggtggccacccggtgtcggtttcattttcctttggaatttctgctttacagacagaacaatggcagcccgagtacttataattggcagtggaggaagggaacatacgctggcctggaaacttgcacagtctcatcatgtcaaacaagtgttggttgccccaggaaacgcaggcactgcctgctctgaaaagatttcaaataccgccatctcaatcagtgaccacactgcccttgctcaattctgcaaagagaagaaaattgaatttgtagttgttggaccagaagcacctctggctgctgggattgttgggaacctgaggtctgcaggagtgcaatgctttggcccaacagcagaagcggctcagttagagtccagcaaaaggtttgccaaagagtttatggacagacatggaatcccaaccgcacaatggaaggctttcaccaaacctgaagaagcctgcagcttcattttgagtgcagacttccctgctttggttgtgaaggccagtggtcttgcagctggaaaaggggtgattgttgcaaagagcaaagaagaggcctgcaaagctgtacaagagatcatgcaggagaaagcctttggggcagctggagaaacaattgtcattgaagaacttcttgacggagaagaggtgtcgtgtctgtgtttcactgatggcaagactgtggcccccatgcccccagcacaggaccataagcgattactggagggagatggtggccctaacacagggggaatgggagcctattgtccagcccctcaggtttctaatgatctattactaaaaattaaagatactgttcttcagaggacagtggatggcatgcagcaagagggtactccatatacaggtattctctatgctggaataatgctgaccaagaatggcccaaaagttctagagtttaattgccgttttggtgatccagagtgccaagtaatcctcccacttcttaaaagtgatctttatgaagtgattcagtccaccttagatggactgctctgcacatctctgcctgtttggctagaaaaccacaccgccctaactgttgtcatggcaagtaaaggttatcctggagactacaccaagggtgtagagataacagggtttcctgaggctcaagctctaggactggaggtgttccatgcaggcactgccctcaaaaatggcaaagtagtaactcatgggggtagagttcttgcagtcacagccatccgggaaaatctcatatcagcccttgaggaagccaagaaaggactagctgctataaagtttgagggagcaatttataggaaagacgtcggctttcgtgccatagctttcctccagcagcccaggagtttgacttacaaggaatctggagtagatatcgcagctggaaatatgctggtcaagaaaattcagcctttagcaaaagccacttccagatcaggctgtaaagttgatcttggaggttttgctggtctttttgatttaaaagcagctggtttcaaagatccccttctggcctctggaacagatggcgttggaactaaactaaagattgcccagctatgcaataaacatgataccattggtcaagatttggtagcaatgtgtgttaatgatattctggcacaaggagcagagcccctcttcttccttgattacttttcctgtggaaaacttgacctcagtgtaactgaagctgttgttgctggaattgctaaagcttgtggaaaagctggatgtgctctccttggaggtgaaacagcagaaatgcctgacatgtatccccctggagagtatgacctagctgggtttgccgttggtgccatggagcgagatcagaaactccctcacctggaaagaatcactgagggtgatgttgttgttggaatagcttcatctggtcttcatagcaatggatttagccttgtgaggaaaatcgtggcaaaatcttccctccagtactcctctccagcacctgatggttgtggtgaccagactttaggggacttacttctcacgcctaccagaatctacagccattcactgttacctgtcctacgttcaggacatgtcaaagcctttgcccatattactggtggaggattactagagaacatccccagagtcctccctgagaaacttggggtagatttagatgcccagacctggaggatccccagggtcttctcatggttgcagcaggaaggacacctctctgaggaagagatggccagaacatttaactgtggggttggcgctgtccttgtggtatcaaaggagcagacagagcagattctgagggatatccagcagcacaaggaagaagcctgggtgattggcagtgtggttgcacgagctgaaggttccccacgtgtgaaagtcaagaatctgattgaaagcatgcaaataaatgggtcagtgttgaagaatggctccctgacaaatcatttctcttttgaaaaaaaaaaggccagagtggctgtcttaatatctggaacaggatcgaacctgcaagcacttatagacagtactcgggaaccaaatagctctgcacaaattgatattgttatctccaacaaagccgcagtagctgggttagataaagcggaaagagctggtattcccactagagtaattaatcataaactgtataaaaatcgtgtagaatttgacagtgcaattgacctagtccttgaagagttctccatagacatagtctgtcttgcaggattcatgagaattctttctggcccctttgtccaaaagtggaatggaaaaatgctcaatatccacccatccttgctcccttcttttaagggttcaaatgcccatgagcaagccctggaaaccggagtcacagttactgggtgcactgtacactttgtagctgaagatgtggatgctggacagattattttgcaagaagctgttcccgtgaagaggggtgatactgtcgcaactctttctgaaagagtaaaattagcagaacataaaatatttcctgcagcccttcagctggtggccagtggaactgtacagcttggagaaaatggcaagatctgttgggttaaagaggaatgaagccttttaattcagaaatggggccagtttagaaagaattatttgctgtttgcatggtggttttttatcatggacttggcccaaaagaaaaactgctaaaagacaaaaaagacctcacccttacttcatctatttttttaataaatagagactcactaaaaaaaaaaaaaaaaaaaaaaa

SEQ ID NO: 501 - DNA, 1298 bp, Homo sapiens
gagccagttccaaaatggcggcaggggtggccgggtggggggttgaggcagaggagttcgaagatgctcctgatgtggagccgctggagcctacacttagcaacatcatcgagcagcgcagcctgaagtggatcttcgtcgggggcaagggtggtgtgggcaagaccacctgcagctgcagcctggcagtccagctctccaaggggcgtgagagtgttctgatcatctccacagacccagcacacaacatctcagatgcttttgaccagaagttctcaaaggtgcctaccaaggtcaaaggctatgacaacctctttgctatggagattgaccccagcctgggcgtggcggagctgcctgacgagttcttcgaggaggacaacatgctgagcatgggcaagaagatgatgcaggaggccatgagcgcatttcccggcatcgatgaggccatgagctatgccgaggtcatgaggctggtgaagggcatgaacttctcggtggtggtatttgacacggcacccacgggccacaccctgaggctgctcaacttccccaccatcgtggagcggggcctgggccggcttatgcagatcaagaaccagatcagccctttcatctcacagatgtgcaacatgctgggcctgggggacatgaacgcagaccagctggcctccaagctggaggagacgctgcccgtcatccgctcagtcagcgaacagttcaaggaccctgagcagacaactttcatctgcgtatgcattgctgagttcctgtccctgtatgagacagagaggctgatccaggagctggccaagtgcaagattgacacacacaatataattgtcaaccagctcgtcttccccgaccccgagaagccctgcaagatgtgtgaggcccgtcacaagatccaggccaagtatctggaccagatggaggacctgtatgaagacttccacatcgtgaagctgccgctgttaccccatgaggtgcggggggcagacaaggtcaacaccttctcggccctcctcctggagccctacaagccccccagtgcccagtagcacagctgccagccccaaccgctgccatttcacactcaccctccaccctccccaccccctcggggcagagtttgcacaaagtcccccccataatacagggggagccacttgggcaggaggcagggaggggtccattccccctggtggggctggtggggagctgtagttgccccctacctctcccacctcttgctcttcaataaaatgatcttaaactgcaaaaaaaaaaaaaaaaaa

SEQ ID NO: 502 - DNA, 605 bp, Homo sapiens
gaagtggcccttgcaggcaagagtgctggagggcggcagcggcgaccggagcggtaggagcagcaatttatccgtgtgcagccccaaactggaaagaagatgctaattaaagtgaagacgctgaccggaaaggagattgagattgacattgaacctacagacaaggtggagcgaatcaaggagcgtgtggaggagaaagagggaatccccccacaacagcagaggctcatctacagtggcaagcagatgaatgatgagaagacagcagctgattacaagattttaggtggttcagtccttcacctggtgttggctctgagaggaggaggtggtcttaggcagtgatggaccctccattttacctctttaccctgtcgctcataatgaggcatcatatatcctctcactctctgggacaccatagccactgccccctcccctggatgcccagtaatgtatgtctactggtgggagactgtgaggatcccaggattcagtattcctggcccagagggccttgctggctactgggtgttagtttgcagtcctgtgtgcttccctctcttatgactgtgtccctggttgtcaataaaatatttcctggc

SEQ ID NO: 503 - DNA, 2443 bp, Homo sapiens
ctccgccgtgctaactcctcgctagctctccctctcacacacgctcacacccggctcgagatggcggcggcggcggcggcggcgggggactcggactcctgggacgccgacgctttctccgtggaagacccagtgcggaaggtggggggcggcggcactgccggcggggaccgctggggaggcgaggacgaggacgaggacgtcaaggataactgggatgacgatgatgatgaaaaaaaagaggaagcagaagtaaaaccagaggtaaaaatttcagaaaagaaaaaaatagcagagaagataaaagagaaagaacggcaacagaagaaaaggcaagaagaaattaaaaagaggttagaagaacccgaagaacctaaagtgctaacaccagaagaacaattagcagataaactgcggctaaagaaattacaggaagagtcagacctcgaattagcaaaggaaacttttggtgttaataatgcagtttatggaatagatgctatgaacccatcttcaagagatgactttacagagtttggaaagttactaaaagataaaattacacaatatgaaaagtcactatattatgccagttttttggaagtcttagttcgagatgtgtgtatttcattggaaattgatgacttgaaaaaaattaccaattcactgactgtgctttgcagtgaaaaacagaagcaagaaaagcaaagcaaagccaaaaagaagaagaaaggtgtggttcctggagggggattaaaagccaccatgaaagatgatctggcagattatggtggttatgatggaggatatgtacaagactatgaagacttcatgtgacattttatcttttcttggtgtcatctttatgttgcccacaatcccttgaacatgtagcacaacttcctttcctttcagttctgccaaatgctacaatcagaagtgcagtatcttttgtgctggttaaaattgggaacctaagttgctactaaatcatagttcaaaacctaataatgttgtcgttgttgctatctgatttcatagcagcagtcactaaattggaaacaaaaggttgcaacgtgacaaaaaaaattgtgtagtatttaccagcaccattcagtaatacagccttaaccatacctccttgaactacttcataacttgtcaagaaaagcagtttgcagcaagggcatgtggtgtgcacctagtattaaaattgctttgtcttaaaattgaacatgaggatattaaaaatacattgtgaagaatactgcttatctcagagtgaagatactgcggctgaaaagcactagtttgatataaaattaaaatgaccaaaaccctccaactttgaagctaaagaaggtaaacctttccattattgcattacatgttgtggaatctctcgagtgcaaagactgtctagttatttatcaggctatttctactgatgaactgcttcaggtgggggagggaaacttatttttatttgcctgatttaagtgtctgagaaacaaatctttgttctcttaggctgcaatggaacaactttaccagggttttggcatttcctttcctttcctttataaaacatgctcagcaaactgcaccagttaactacagtttggtaaattgttatgttaacaattatgacatctgcaatgttttataaagcaactaatttaataaaatcactgttgtgaggacttaaattttgtgttacctcccaatatatactttttgagagtatagaacacagctcttgggagtacagttctctacgttctctactaaatcttaataaatgcttggacatagttacagctttaaaacatgagtgatttgccaggtccttatgttgtcaccatagagcaacaaaggtatagggctgccttcctcttatttatttggggacattattttgttatttagataccaaggcctaattaattaagtacctataagaactatttatttggagtaactgagcctgtaactcaggtttatggctgttaagtatagattggggaatctttattatgtcttctcctaagcagtttaaccaaatgtgtggttagtgtttttttattcccctaagacagaaagaacaaaaaatgttttaaatttctcttatataggaaataataggaacgtcaaagctctgtatacctactaagtggaaaacaagaccatcatctaagtgatttgagaaattaacaaaagtagtgactacacagcaataattacagtaaattaaataaagattcctttaaggcagacaagggctaagatttccttagcagtaataatgacatacactgaattgaaaatctattttattacagaaagatcagtttctaacaaatgaaaatgtatcacctgttccttaactgtgtaaataataattaaatttctttgaaactggaaaaaaaaaaaaaaaaaaaaa

SEQ ID NO: 504 - DNA, 2462 bp, Homo sapiens
agcaggaattctgaaatccccaccacttcctccctccgggggatttgatcccctatggccaccgctaacagcatcatcgtgctggatgatgatgacgaagatgaagcagctgctcagccagggccctcccacccactccccaatgcggcctcacctggggcagaagcccctagctcctctgagcctcatggggccagaggaagcagtagttcgggcggcaagaaatgctacaagctggagaatgagaagctgttcgaagagttccttgaactttgtaagatgcagacagcagaccaccctgaggtggtcccattcctctataaccggcagcaacgtgcccactctctgtttttggcctcggcggagttctgcaacatcctctctagggtcctgtctcgggcccggagccggccagccaagctctatgtctacatcaatgagctctgcactgttctcaaggcccactcagccaaaaagaagctgaacttggcccctgccgccaccacctccaatgagccctctgggaataaccctcccacacacctctccttggaccccacaaatgctgaaaacactgcctctcggtctccaaggacccgtggttcccggcggcagatccagcgtttggagcagctgctggcgctctatgtggcagagatccggcggctgcaggaaaaggagttggatctctcagaattggatgacccagactccgcatacctgcaggaggcacggttgaagcgtaagctgatccgcctctttgggcgactatgtgagctgaaagactgctcttcactgaccggccgtgtcatagagcagcgcatcccctaccgtggcacccgctacccagaggttaacaggcgcattgagcggctcatcaacaagccagggcctgataccttccctgactatggggatgtgcttcgggctgtagagaaggcagctgcccgacacagccttggcctcccccgacagcagctccagctcatggctcaggatgccttccgagatgtgggcatctggttacaggagcgacgtcacctcgatctcatctacaactttggctgccacctcacagatgactataggccaggcgttgaccctgcactatcagatcctgtgttggcccggcgccttcgggaaaaccagagtttggccatgagtcggctggatgaggtcatctccaaatacgcaatgtcgcaagacaaaagtgaggagggcgagagaaaaaagagaagagctcggctccaaggcacctcttcccactctgcagacacccccgaagcctccttggattctggtgagggccctagtggaatggcatcccaggggtgcccttctgcctccagagctgagacagatgacgaagacgatgaggagagtgatgaggaagaggaggaggaggaggaagaagaagaggaggaggccacagattctgaagaggaggaggatctggaacagatgcaggagggtcaggaggatgatgaagaggaggacgaagaggaagaagcagcagcaggtaaagatggagacaagagccccatgtcctcactacagatctccaatgaaaagaacctggaacctggcaaacagatcagcagatcttcaggggagcagcaaaacaaaggacgcatagtgtcaccatcgttactgtcagaagaacccctggccccctccagcatagatgctgaaagcaatggagaacagcctgaggagctgaccctggaggaagaaagccctgtgtctcagctctttgagctagagattgaagctttgcccctggataccccttcctctgtggagacggacatttcctcttccaggaagcaatcagaggagcccttcaccactgtcttagagaatggagcaggcatggtctcttctacttccttcaatggaggcgtctctcctcacaactggggagattctggtcccccctgcaaaaaatctcggaaggagaagaagcaaacaggatcagggccattaggaaacagctatgtggaaaggcaaaggtcagtgcatgagaagaatgggaaaaagatatgtaccctgcccagcccaccttcccccttagcttccttggccccagttgctgattcctccacgagggtggactctcccagccatggcctggtgaccagctccctctgcatcccttctccagcccggctgtcccaaaccccccattcacagcctcctcggcctggtacttgcaagacaagtgtggccacacaatgcgatccagaagagatcatcgtgctctcagactctgattagctgcctccccttctccctgcctccagaatgttctgggataacatttggaggaaggtgggaagcagatgactgaggaagggatggactaagctaatccccttttggtggtgtttctttaaaaaaaaaaaaaaagcttaagttttacacagaaacattaataaacaataaagttcttttcttactgt

SEQ ID NO: 505 - DNA, 2869 bp, Homo sapiens
cccttctccccggcggttagtgctgagagtgcggagtgtgtgctccgggctcggaacacacatttattattaaaaaatccaaaaaaaatctaaaaaaatcttttaaaaaaccccaaaaaaatttacaaaaaatccgcgtctcccccgccggagacttttattttttttcttcctcttttataaaataacccggtgaagcagccgagaccgacccgcccgcccgcggccccgcagcagctccaagaaggaaccaagagaccgaggccttcccgctgcccggacccgacaccgccaccctcgctccccgccggcagccggcagccagcggcagtggatcgaccccgttctgcggccgttgagtagttttcaattccggttgatttttgtccctctgcgcttgctccccgctcccctccccccggctccggcccccagccccggcactcgctctcctcctctcacggaaaggtcgcggcctgtggccctgcgggcagccgtgccgagatgaaccccagtgcccccagctaccccatggcctcgctctacgtgggggacctccaccccgacgtgaccgaggcgatgctctacgagaagttcagcccggccgggcccatcctctccatccgggtctgcagggacatgatcacccgccgctccttgggctacgcgtatgtgaacttccagcagccggcggacgcggagcgtgctttggacaccatgaattttgatgttataaagggcaagccagtacgcatcatgtggtctcagcgtgatccatcacttcgcaaaagtggagtaggcaacatattcattaaaaatctggacaaatccattgataataaagcactgtatgatacattttctgcttttggtaacatcctttcatgtaaggtggtttgtgatgaaaatggttccaagggctatggatttgtacactttgagacgcaggaagcagctgaaagagctattgaaaaaatgaatggaatgctcctaaatgatcgcaaagtatttgttggacgatttaagtctcgtaaagaacgagaagctgaacttggagctagggcaaaagaattcaccaatgtttacatcaagaattttggagaagacatggatgatgagcgccttaaggatctctttggcaagtttgggcctgccttaagtgtgaaagtaatgactgatgaaagtggaaaatccaaaggatttggatttgtaagctttgaaaggcatgaagatgcacagaaagctgtggatgagatgaacggaaaggagctcaatggaaaacaaatttatgttggtcgagctcagaaaaaggtggaacggcagacggaacttaagcgcaaatttgaacagatgaaacaagataggatcaccagataccagggtgttaatctttatgtgaaaaatcttgatgatggtattgatgatgaacgtctccggaaagagttttctccatttggtacaatcactagtgcaaaggttatgatggagggtggtcgcagcaaagggtttggttttgtatgtttctcctccccagaagaagccactaaagcagttacagaaatgaacggtagaattgtggccacaaagccattgtatgtagctttagctcagcgcaaagaagagcgccaggctcacctcactaaccagtatatgcagagaatggcaagtgtacgagctgttcccaaccctgtaatcaacccctaccagccagcacctccttcaggttacttcatggcagctatcccacagactcagaaccgtgctgcatactatcctcctagccaaattgctcaactaagaccaagtcctcgctggactgctcagggtgccagacctcatccattccaaaatatgcccggtgctatccgcccagctgctcctagaccaccatttagtactatgagaccagcttcttcacaggttccacgagtcatgtcaacacagcgtgttgctaacacatcaacacagacaatgggtccacgtcctgcagctgcagccgctgcagctactcctgctgtccgcaccgttccacagtataaatatgctgcaggagttcgcaatcctcagcaacatcttaatgcacagccacaagttacaatgcaacagcctgctgttcatgtacaaggtcaggaacctttgactgcttccatgttggcatctgcccctcctcaagagcaaaagcaaatgttgggtgaacggctgtttcctcttattcaagccatgcaccctactcttgctggtaaaatcactggcatgttgttggagattgataattcagaacttcttcatatgctcgagtctccagagtcactccgttctaaggttgatgaagctgtagctgtactacaagcccaccaagctaaagaggctgcccagaaagcagttaacagtgccaccggtgttccaactgtttaaaattgatcagggaccatgaaaagaaacttgtgcttcaccgaagaaaaatatctaaacatcgaaaaacttaaatattatggaaaaaaaacattgcaaaatataaaataaataaaaaaaggaaaggaaactttgaaccttatgtaccgagcaaatgccaggtctagcaaacataatgctagtcctagattacttattgatttaaaaacaaaaaaacacaaaaaaatagtaaaatataaaaacaaattaatgttttatagaccctgggaaaaagaattttcagcaaagtacaaaaatttaaagcattcctttctttaattttgtaattctttactgtggaatagctcagaatgtcagttctgttttaagtaacagaattgataactgagcaaggaaacgtaatttggattataaaattcttgctttaataaaaattccttaaacagtgaaaaaaaaa

SEQ ID NO: 506 - DNA, 615 bp, Homo sapiens
agccccgggacagaccctgtgttccccaaggcgtcttcagcctgccccgagggacagagactggagctcaatcttggaccgtacagacgctcgccgacaacctggccggcggcaccatgaggcaggcgggacgcgcagcgctgctggccgcgctgctgctcctggtacagctgtgccctgggagcagccagaggagccccgaggcggccggggtccaggacccgagtctgcgctggagccccggggcacggaaccagggtggcggggcccgcgcgctcctcttgctgctggcggagcgcttcccgcgccgcgcggggcccggccgattgggactcgggacggcaggcgagcggccgcggcgggacaacccttctctgtccattgacctcacctttcacctgctgcggaccctgctggagctggcgcggacgcagagccagcgggagcgcgccgagcagaaccgcatcatattcgactcggtgggcaagtgatggcccggtttggggctgcgaaaacgttgacccctttcccccaccccagagttgggatgcggggcagagccaccagggcactgtctgcgtgactattttttaataaaagtactgaagacccgtt

SEQ ID NO: 507 - DNA, 6803 bp, Homo sapiens
cggccccagaaaacccgagcgagtagggggcggcgcgcaggagggaggagaactgggggcgcgggaggctggtgggtgtcgggggtggagatgtagaagatgtgacgccgcggcccggcgggtgccagattagcggacgcgctgcccgcggttgcaacgggatcccgggcgctgcagcttgggaggcggctctccccaggcggcgtccgcggagacacccatccgtgaaccccaggtcccgggccgccggctcgccgcgcaccaggggccggcggacagaagagcggccgagcggctcgaggctgggggaccgcgggcgcggccgcgcgctgccgggcgggaggctggggggccggggccggggccgtgccccggagcgggtcggaggccggggccggggccgggggacggcggctccccgcgcggctccagcggctcggggatcccggccgggccccgcagggaccatggcagccgggagcatcaccacgctgcccgccttgcccgaggatggcggcagcggcgccttcccgcccggccacttcaaggaccccaagcggctgtactgcaaaaacgggggcttcttcctgcgcatccaccccgacggccgagttgacggggtccgggagaagagcgaccctcacatcaagctacaacttcaagcagaagagagaggagttgtgtctatcaaaggagtgtgtgctaaccgttacctggctatgaaggaagatggaagattactggcttctaaatgtgttacggatgagtgtttcttttttgaacgattggaatctaataactacaatacttaccggtcaaggaaatacaccagttggtatgtggcactgaaacgaactgggcagtataaacttggatccaaaacaggacctgggcagaaagctatactttttcttccaatgtctgctaagagctgattttaatggccacatctaatctcatttcacatgaaagaagaagtatattttagaaatttgttaatgagagtaaaagaaaataaatgtgtatagctcagtttggataattggtcaaacaattttttatccagtagtaaaatatgtaaccattgtcccagtaaagaaaaataacaaaagttgtaaaatgtatattctcccttttatattgcatctgctgttacccagtgaagcttacctagagcaatgatctttttcacgcatttgctttattcgaaaagaggcttttaaaatgtgcatgtttagaaacaaaatttcttcatggaaatcatatacattagaaaatcacagtcagatgtttaatcaatccaaaatgtccactatttcttatgtcattcgttagtctacatgtttctaaacatataaatgtgaatttaatcaattcctttcatagttttataattctctggcagttccttatgatagagtttataaaacagtcctgtgtaaactgctggaagttcttccacagtcaggtcaattttgtcaaacccttctctgtacccatacagcagcagcctagcaactctgctggtgatgggagttgtattttcagtcttcgccaggtcattgagatccatccactcacatcttaagcattcttcctggcaaaaatttatggtgaatgaatatggctttaggcggcagatgatatacatatctgacttcccaaaagctccaggatttgtgtgctgttgccgaatactcaggacggacctgaattctgattttataccagtctcttcaaaaacttctcgaaccgctgtgtctcctacgtaaaaaaagagatgtacaaatcaataataattacacttttagaaactgtatcatcaaagattttcagttaaagtagcattatgtaaaggctcaaaacattaccctaacaaagtaaagttttcaatacaaattctttgccttgtggatatcaagaaatcccaaaatattttcttaccactgtaaattcaagaagcttttgaaatgctgaatatttctttggctgctacttggaggcttatctacctgtacatttttggggtcagctctttttaacttcttgctgctctttttcccaaaaggtaaaaatatagattgaaaagttaaaacattttgcatggctgcagttcctttgtttcttgagataagattccaaagaacttagattcatttcttcaacaccgaaatgctggaggtgtttgatcagttttcaagaaacttggaatataaataattttataattcaacaaaggttttcacattttataaggttgatttttcaattaaatgcaaatttgtgtggcaggatttttattgccattaacatatttttgtggctgctttttctacacatccagatggtccctctaactgggctttctctaattttgtgatgttctgtcattgtctcccaaagtatttaggagaagccctttaaaaagctgccttcctctaccactttgctggaaagcttcacaattgtcacagacaaagatttttgttccaatactcgttttgcctctatttttcttgtttgtcaaatagtaaatgatatttgcccttgcagtaattctactggtgaaaaacatgcaaagaagaggaagtcacagaaacatgtctcaattcccatgtgctgtgactgtagactgtcttaccatagactgtcttacccatcccctggatatgctcttgttttttccctctaatagctatggaaagatgcatagaaagagtataatgttttaaaacataaggcattcatctgccatttttcaattacatgctgacttcccttacaattgagatttgcccataggttaaacatggttagaaacaactgaaagcataaaagaaaaatctaggccgggtgcagtggctcatgcctatattccctgcactttgggaggccaaagcaggaggatcgcttgagcccaggagttcaagaccaacctggtgaaaccccgtctctacaaaaaaacacaaaaaatagccaggcatggtggcgtgtacatgtggtctcagatacttgggaggctgaggtgggagggttgatcacttgaggctgagaggtcaaggttgcagtgagccataatcgtgccactgcagtccagcctaggcaacagagtgagactttgtctcaaaaaaagagaaattttccttaataagaaaagtaatttttactctgatgtgcaatacatttgttattaaatttattatttaagatggtagcactagtcttaaattgtataaaatatcccctaacatgtttaaatgtccatttttattcattatgctttgaaaaataattatggggaaatacatgtttgttattaaatttattattaaagatagtagcactagtcttaaatttgatataacatctcctaacttgtttaaatgtccatttttattctttatgcttgaaaataaattatggggatcctatttagctcttagtaccactaatcaaaagttcggcatgtagctcatgatctatgctgtttctatgtcgtggaagcaccggatgggggtagtgagcaaatctgccctgctcagcagtcaccatagcagctgactgaaaatcagcactgcctgagtagttttgatcagtttaacttgaatcactaactgactgaaaattgaatgggcaaataagtgcttttgtctccagagtatgcgggagacccttccacctcaagatggatatttcttccccaaggatttcaagatgaattgaaatttttaatcaagatagtgtgctttattctgttgtattttttattattttaatatactgtaagccaaactgaaataacatttgctgttttataggtttgaagaacataggaaaaactaagaggttttgtttttatttttgctgatgaagagatatgtttaaatatgttgtattgttttgtttagttacaggacaataatgaaatggagtttatatttgttatttctattttgttatatttaataatagaattagattgaaataaaatataatgggaaataatctgcagaatgtgggtttcctggtgtttcctctgactctagtgcactgatgatctctgataaggctcagctgctttatagttctctggctaatgcagcagatactcttcctgccagtggtaatacgattttttaagaaggcagtttgtcaattttaatcttgtggatacctttatactcttagggtattattttatacaaaagccttgaggattgcattctattttctatatgaccctcttgatatttaaaaaacactatggataacaattcttcatttacctagtattatgaaagaatgaaggagttcaaacaaatgtgtttcccagttaactagggtttactgtttgagccaatataaatgtttaactgtttgtgatggcagtattcctaaagtacattgcatgttttcctaaatacagagtttaaataatttcagtaattcttagatgattcagcttcatcattaagaatatcttttgttttatgttgagttagaaatgccttcatatagacatagtctttcagacctctactgtcagttttcatttctagctgctttcagggttttatgaattttcaggcaaagctttaatttatactaagcttaggaagtatggctaatgccaacggcagtttttttcttcttaattccacatgactgaggcatatatgatctctgggtaggtgagttgttgtgacaaccacaagcactttttttttttttaaagaaaaaaaggtagtgaatttttaatcatctggactttaagaaggattctggagtatacttaggcctgaaattatatatatttggcttggaaatgtgtttttcttcaattacatctacaagtaagtacagctgaaattcagaggacccataagagttcacatgaaaaaaatcaattcatttgaaaaggcaagatgcaggagagaggaagccttgcaaacctgcagactgctttttgcccaatatagattgggtaaggctgcaaaacataagcttaattagctcacatgctctgctctcacgtggcaccagtggatagtgtgagagaattaggctgtagaacaaatggccttctctttcagcattcacaccactacaaaatcatcttttatatcaacagaagaataagcataaactaagcaaaaggtcaataagtacctgaaaccaagattggctagagatatatcttaatgcaatccattttctgatggattgttacgagttggctatataatgtatgtatggtattttgatttgtgtaaaagttttaaaaatcaagctttaagtacatggacatttttaaataaaatatttaaagacaatttagaaaattgccttaatatcattgttggctaaatagaataggggacatgcatattaaggaaaaggtcatggagaaataatattggtatcaaacaaatacattgatttgtcatgatacacattgaatttgatccaatagtttaaggaataggtaggaaaatttggtttctatttttcgatttcctgtaaatcagtgacataaataattcttagcttattttatatttccttgtcttaaatactgagctcagtaagttgtgttaggggattatttctcagttgagactttcttatatgacattttactatgttttgacttcctgactattaaaaataaatagtagaaacaattttcataaagtgaagaattatataatcactgctttataactgactttattatatttatttcaaagttcatttaaaggctactattcatcctctgtgatggaatggtcaggaatttgttttctcatagtttaattccaacaacaatattagtcgtatccaaaataacctttaatgctaaactttactgatgtatatccaaagcttctccttttcagacagattaatccagaagcagtcataaacagaagaataggtggtatgttcctaatgatattatttctactaatggaataaactgtaatattagaaattatgctgctaattatatcagctctgaggtaatttctgaaatgttcagactcagtcggaacaaattggaaaatttaaatttttattcttagctataaagcaagaaagtaaacacattaatttcctcaacatttttaagccaattaaaaatataaaagatacacaccaatatcttcttcaggctctgacaggcctcctggaaacttccacatatttttcaactgcagtataaagtcagaaaataaagttaacataactttcactaacacacacatatgtagatttcacaaaatccacctataattggtcaaagtggttgagaatatattttttagtaattgcatgcaaaatttttctagcttccatcctttctccctcgtttcttctttttttgggggagctggtaactgatgaaatcttttcccaccttttctcttcaggaaatataagtggttttgtttggttaacgtgatacattctgtatgaatgaaacattggagggaaacatctactgaatttctgtaatttaaaatattttgctgctagttaactatgaacagatagaagaatcttacagatgctgctataaataagtagaaaatataaatttcatcactaaaatatgctattttaaaatctatttcctatattgtatttctaatcagatgtattactcttattatttctattgtatgtgttaatgattttatgtaaaaatgtaattgcttttcatgagtagtatgaataaaattgattagtttgtgttttcttgtctcccgaaaaaaaaaaaaaaaaaaaaaaaaaaaaaa

SEQ ID NO: 508 - DNA, 642 bp, Homo sapiens
atggcgcccgcgcagcgcccgctgctcccgctgctgctcctgctgttaccgctgccgccgccgcccttcgcgcgcgccgaggacgccgcccgcgccaactcggaccgctacgccgtctactggaaccgcagcaaccccaggttccacgcaggcgcgggggacgacggcgggggctacacggtggaggtgagcatcaatgactacctggacatctactgcccgcactatggggcgccgctgccgccggccgagcgcatggagcactacgtgctgtacatggtcaacggcgagggccacgcctcctgcgaccaccgccagcgcggcttcaagcgctgggagtgcaaccggcccgcggcgcccggggggccgctcaagttctcggagaagttccagctcttcacgcccttctccctgggcttcgagttccggcccggccacgagtattactacatctctgccacgcctcccaatgctgtggaccggccctgcctgcgactgaaggtgtacgtgcggccgaccaacgagaccctgtacgaggctcctgagcccatcttcaccagcaataactcgtgtagcagcccgggcggctgccgcctcttcctcagcaccatccccgtgctctggaccctcctgggttcctag

SEQ ID NO: 509 - DNA, 1771 bp, Homo sapiens
gttcgtagcagaaatggcggctgcggcggctcgagtggtgttgtcatccgcggcgcgaggcggcctctggggtttcagcgagagtcttctaatccgaggcgctgcgggacggtcattatattttggagagaacagattaagaagtacacaggctgctacccaagttgttctgaatgttcctgaaacaagagtaacatgtttagaaagtggactcagagtagcttcggaagactctgggctctcaacatgcacagttggactctggattgatgctggaagtagatacgaaaatgagaagaacaatggaacagcacactttctggagcatatggctttcaagggcaccaagaagagatcccagttagatctggaacttgagattgaaaatatgggtgctcatctcaatgcctatacctccagagagcagactgtatactatgccaaagcattctctaaagacttgccaagagctgtagaaattcttgctgatataatacaaaacagcacattgggagaagcagagattgaacgtgagcgtggagtaatccttagagagatgcaggaagttgaaaccaatttacaagaagttgtttttgattatcttcatgccacagcttatcaaaatactgcacttggacggacaattttgggaccaactgaaaatatcaaatctataagtcgtaaggacttagtggattatataaccacacattataaggggccaagaatagtgcttgctgctgctggaggtgtttcccatgatgaattgcttgacttagcaaagtttcatttcggtgactctttatgcacacacaaaggagaaataccagctctgcctccctgcaaattcacaggaagtgagattcgtgtgagggatgacaagatgcctttggcgcaccttgcaatagctgttgaagctgttggttgggcacatccagatacaatctgtctcatggttgcaaacacgctgattggcaactgggatcgctcttttgggggaggaatgaatttatctagcaagctggcccagctcacttgtcatggcaatctttgccatagctttcagtctttcaacacttcctacacagatacaggattatggggactgtatatggtttgtgaatcatccactgttgcagacatgctacatgttgttcaaaaagaatggatgcgactctgtacaagtgtcacagaaagtgaggttgcacgagccagaaatcttctgaaaacaaacatgttgttgcagcttgatggttcaactccaatttgtgaagatattggtaggcaaatgttatgctataatagaaggattcccatccctgagcttgaagcaagaattgatgctgtgaatgctgagacaattcgagaagtatgtaccaaatacatttataataggagtccagctattgctgctgttggtcccattaagcaactaccagattttaaacagatacgcagtaacatgtgttggcttcgtgattaaaatgctcctaatcaagattgtttgaacacatgtatttataaaacagagctagagaaaaataaaaatgaacatgtatatacatttggaaatttgaattaaatactgtatcatactttcaaaggataaaaagactacccctctgaaggttgttttgtattaatggtcagtctttgttctctgagaaattatgttggaagcagcatactttcaaattattaccatgagtataattttaagaatgaaaatgtttacagtattttcagttttattataaaaatgcacacacaa

SEQ ID NO: 510 - DNA, 3247 bp, Homo sapiens
gaggagctctgcgcggcgcggcgggcgatccgagccgggacgggctgcaggcgggggtgctgcagaggacacgaggcggcgggctggagacatggaccgcggcgagcaaggtctgctgagaacagacccagtccctgaggaaggagaagatgttgctgccacgatcagtgccacagagaccctctcggaagaggagcaggaagagctaagaagagaacttgcaaaggtagaagaagaaatccagactctgtctcaagtgttagcagcaaaagagaagcatctagcagagatcaagcggaaacttggaatcaattctctacaggaactaaaacagaacattgccaaagggtggcaagacgtgacagcaacatctgcttacaagaagacatctgaaaccttatcccaggctggacagaaggcctcagctgctttttcgtctgttggctcagtcatcaccaaaaagctggaagatgtaaaaaactccccaacttttaaatcatttgaagaaaaggtcgaaaacttaaagtctaaagtagggggaaccaagcctgctggtggtgattttggagaagtcttgaattcggctgcaaatgctagtgccaccaccacggagcctcttccagaaaagacacaggagagcctgtgagattcctacctttgttctgctacccactgccagatgctgcaagcgaggtccaagcacatcttgtcaacatgcattgccatgaatttctaccagatgtgcttttatttagctttacatattcctttgaccaaatagtttgtgggttaaacaaaatgaaaatatcttcacctctattcttgggaaacaccctttagtgtacatttatgttcctttatttaggaaacaccattataaaaacacttatagtaaatggggacattcactataatgatctaagaagctacagattgtcatagttgttttcctgctttacaaaattgctccagatctggaatgccagtttgacctttgtcttctataatatttcctttttttcccctctttgaatctctgtatatttgattcttaactaaaattgttctcttaaatattctgaatcctggtaattaaaagtttgggtgtattttctttacctccaaggaaagaactactagctacaaaaaatattttggaataagcattgttttggtataaggtacatattttggttgaagacaccagactgaagtaaacagctgtgcatccaatttattatagttttgtaagtaacaatatgtaatcaaacttctaggtgacttgagagtggaacctcctatatcattatttagcaccgtttgtgacagtaaccatttcagtgtattgtttattataccacttatatcaacttatttttcaccaggttaaaattttaatttctacaaaataacattctgaatcaagcacactgtatgttcagtaggttgaactatgaacactgtcatcaatgttcagttcaaaagcctgaaagtttagatctagaagctggtaaaaatgacaatatcaatcacattaggggaaccattgttgtcttcacttaatccatttagcactatttaaaataagcacaccaagttatatgactaatataacttgaaaattttttatactgaggggttggtgataactcttgaggatgtaatgcattaataaaaatcaactcatcattttctacttgttttcaatgtgttggaaactgtaaaatgatactgtagaacctgtctcctactttgaaaactgaatgtcagggctgagtgaatcaaagtgtctagacatatttgcatagaggccaaggtattctattctaataactgcttactcaacactaccaccttttccttatactgtatatgattatggcctacaatgttgtatttgttatttattaaattgtgattgttttattattgtttatgccaaatgttaactgccaagcttggagtgacctaaagcattttttaaaagcatggctagatttacttcagtataaattatcttatgaaaaccaaattttaaaagccacaggtgttgattgttataaaataacatgctgccattcttgattgctagagtttttgttagtactttggatgcaattaaaactatgtgctatcacatgtgaaaagcttaataaattccatctatcagtagtataggtctcaatatttattatgagaccagtggtctggaaacagcttgttgtaccgaatcaactggagtctatgcttaaaaaaaaaaatttttttttaaccatccttaaattattgcttaatggtatcatattaacatattctaaataagggctttaaggcacaggctgttgaagcattttctcagaggagtggatctgtagaagtctgtctttctatagaaatattgtgcttactcaagtgttaaattattttttctatgaactagtctacttcttaaaattcaaacatattcttttgatcacattgtttcttgagcatcctgccctgctactaacttttcaacaaggcaaaatggagtaaagtggcaatttctttagatgagtgaaataccctcaagtctcttttctgcccaaaaagggaaaagtgatagaaatgggggtggcaagtggggtgagtggatgaaggtgggtattgggggtggctgtgaaagaaaataatggagaatcacttttctagacatctacctatacttaatctaagaaacaaagtaatctactgtaaagtactctgccccttgaaagaagtattaaaaagagtgaggatggatttagaaaaaaacatgaatttagaaatattcaaaatggtttttgtggcagattcaatattatgaattcacagatatttaaagaatgagaaacatagtaattagtagaaatgccagaaacagttcctggttcctcttgtgtttgacactaagaaaatagcaagagtgtgaaatctcagatacttatgaaatctcacagatgtaaggactcaagtgtagaagaaaatatccccttcttacaaaaagaaatgtcaatttatggagtttgtgggaaatagggcaagaattcttatgcttatgagagccaagtagtcagtggaagagagtagagctcaaaactggattatcaccttagcaacttagaatagtttgaaatagaaaaaaagtatttaatttggatctggatctgttaagatatgcacagtctattttttgtatagtattggaaaataaaaatgctataatttg

SEQ ID NO: 511 - DNA, 1194 bp, Homo sapiens
ccttaatggcgcccgcccagactcctggaagtgagcggcctagcgagcgagctcccaggcgcaaagcacgccggaagctgtagttccgccatcggacggaagccgaccggggcgtgcggagggatgtggcccggaatattggtagggggggcccgggtggcgtcatgcaggtaccccgcgctggggcctcgcctcgccgctcactttccagcgcagcggccgccgcagcggacactccagaacggcctggccctgcagcggtgcctgcacgcgacggcgacccgggctctcccgctcattcccatcgtggtggagcagacgggtcgcggcgagcgcgcctatgacatctactcgcggctgctgcgggagcgcatcgtgtgcgtcatgggcccgatcgatgacagcgttgccagccttgttatcgcacagctcctcttcctgcaatccgagagcaacaagaagcccatccacatgtacatcaacagccctggtggtgtggtgaccgcgggcctggccatctacgacacgatgcagtacatcctcaacccgatctgcacctggtgcgtgggccaggccgccagcatgggctccctgcttctcgccgccggcaccccaggcatgcgccactcgctccccaactcccgtatcatgatccaccagccctcaggaggcgcccggggccaagccacagacattgccatccaggcagaggagatcatgaagctcaagaagcagctctataacatctacgccaagcacaccaaacagagcctgcaggtgatcgagtccgccatggagagggaccgctacatgagccccatggaggcccaggagtttggcatcttagacaaggttctggtccaccctccccaggacggtgaggatgagcccacgctggtgcagaaggagcctgtagaagcagcgccggcagcagaacctgtcccagctagcacctgagagctgggcctcctctccagaatcatgtggaggggccagaggcctgccagacccccagctgggccctgctcaccccttgttgctgggcttggaggggcctcttgaggaacttttaatttgcaggggtgcccgctatggacggggcattccagctgagacactgtgattttaaattaaatctttgtggtctttgcaaaaaaaaaaaaaaaaaaaaaaaaaaaaaaaaaaaaaaaaaaa

SEQ ID NO: 512 - DNA, 1635 bp, Homo sapiens
atgtctgacggtctggataatgaagagaaacccccggctcctccactgaggatgaatagtaacaaccgggattcttcagcactcaaccacagctccaaaccacttcccatggcccctgaagagaagaataagaaagccaggcttcgctctatcttcccaggaggaggggataaaaccaataagaagaaggagaaagagcgcccagagatctctcttccttcagactttgagcatacgattcatgtggggtttgatgcagtcaccggggaattcactggaattccagagcaatgggcacgattactccaaacttccaacataacaaaattggaacagaagaagaacccacaagctgttctagatgttctcaaattctatgattccaaagaaacagtcaacaaccagaaatacatgagctttacatcaggagataaaagtgcacatggatacatagcagcccatccttcgagtacaaaaacagcatctgagcctccattggcccctcctgtgtctgaagaagaagatgaagaggaagaagaagaagaagatgaaaatgagccaccaccagttatcgcaccaagaccagagcatacaaaatcaatctatactcgttctgtggttgaatccattgcttcaccagcagtaccaaataaagaggtcacaccaccctctgctgaaaatgccaattccagtactttgtacaggaacacagatcggcaaagaaaaaaatccaagatgacagatgaggagatcttagagaagctaagaagcattgtgagtgttggggacccaaagaaaaaatacacaagatttgaaaaaattggtcaaggggcatcaggtactgtttatacagcactagacattgcaacaggacaagaggtggccataaagcagatgaaccttcaacagcaacccaagaaggaattaattattaatgaaattctggtcatgagggaaaataagaaccctaatattgttaattatttagatagctacttggtgggtgatgaactatgggtagtcatggaatacttggctggtggctctctgactgatgtggtcacagagacctgtatggatgaaggacagatagcagctgtctgcagagagtgcctgcaagctttggatttcctgcactcaaaccaggtgatccatagagatataaagagtgacaatattcttctcgggatggatggctctgttaaattgactgactttgggttctgtgcccagatcactcctgagcaaagtaaacgaagcactatggtgggaaccccatattggatggcacctgaggtggtgactcgaaaagcttatggtccgaaagttgatatctggtctcttggaattatggcaattgaaatggtggaaggtgaacccccttaccttaatgaaaatccactcagggcattgtatctgatagccactaatggaactccagagctccagaatcctgagagactgtcagctgtattccgtgactttttaaatcgctgtcttgagatggatgtggataggcgaggatctgccaaggagcttttgcagcatccatttttaaaattagccaagcctctctccagcctgactcctctgattatcgctgcaaaggaagcaattaagaacagcagccgctaa

SEQ ID NO: 513 - DNA, 2672 bp, Homo sapiens
aggaagagccgcgggcccggcggctgaggccaccccggcggcggctggagagcgaggaggagcgggtggccccgcgctgcgcccgccctcgcctcacctggcgcaggtggacacctgcgcaggtgtgtgccctccggcccctgaagcatggccagcagcggcatggctgacagcgccaaccacctgcccttctttttcggcaacatcacccgggaggaggcagaagattacctggtccaggggggcatgagtgatgggctttatttgctgcgccagagccgcaactacctgggtggcttcgccctgtccgtggcccacgggaggaaggcacaccactacaccatcgagcgggagctgaatggcacctacgccatcgccggtggcaggacccatgccagccccgccgacctctgccactaccactcccaggagtctgatggcctggtctgcctcctcaagaagcccttcaaccggccccaaggggtgcagcccaagactgggccctttgaggatttgaaggaaaacctcatcagggaatatgtgaagcagacatggaacctgcagggtcaggctctggagcaggccatcatcagtcagaagcctcagctggagaagctgatcgctaccacagcccatgaaaaaatgccttggttccatggaaaaatctctcgggaagaatctgagcaaattgtcctgataggatcaaagacaaatggaaagttcctgatccgagccagagacaacaacggctcctacgccctgtgcctgctgcacgaagggaaggtgctgcactatcgcatcgacaaagacaagacagggaagctctccatccccgagggaaagaagttcgacacgctctggcagctagtcgagcattattcttataaagcagatggtttgttaagagttcttactgtcccatgtcaaaaaatcggcacacagggaaatgttaattttggaggccgtccacaacttccaggttcccatcctgcgacttggtcagcgggtggaataatctcaagaatcaaatcatactccttcccaaagcctggccacagaaagtcctcccctgcccaagggaaccggcaagagagtactgtgtcattcaatccgtatgagccagaacttgcaccctgggctgcagacaaaggcccccagagagaagccctacccatggacacagaggtgtacgagagcccctacgcggaccctgaggagatcaggcccaaggaggtttacctggaccgaaagctgctgacgctggaagacaaagaactgggctctggtaattttggaactgtgaaaaagggctactaccaaatgaaaaaagttgtgaaaaccgtggctgtgaaaatactgaaaaacgaggccaatgaccccgctcttaaagatgagttattagcagaagcaaatgtcatgcagcagctggacaacccgtacatcgtgcgcatgatcgggatatgcgaggccgagtcctggatgctagttatggagatggcagaacttggtcccctcaataagtatttgcagcagaacagacatgtcaaggataagaacatcatagaactggttcatcaggtttccatgggcatgaagtacttggaggagagcaattttgtgcacagagatctggctgcaagaaatgtgttgctagttacccaacattatgccaagatcagtgatttcggactctccaaagcactgcgtgctgatgaaaactactacaaggcccagacccatggaaagtggcctgtcaagtggtacgctccggaatgcatcaactactacaagttctccagcaaaagcgatgtctggagctttggagtgttgatgtgggaagcattctcctatgggcagaagccatatcgagggatgaaaggaagtgaagtcaccgctatgttagagaaaggagagcggatggggtgccctgcagggtgtccaagagagatgtacgatctcatgaatctgtgctggacatacgatgtggaaaacaggcccggattcgcagcagtggaactgcggctgcgcaattactactatgacgtggtgaactaaccgctcccgcacctgtcggtggctgcctttgatcacaggagcaatcacaggaaaatgtatccagaggaattgattgtcagccacctccctctgccagtcgggagagccaggcttggatggaacatgcccacaacttgtcacccaaagcctgtcccaggactcaccctccacaaagcaaaggcagtcccgggagaaaagacggatggcaggatccaaggggctagctggatttgtttgttttcttgtctgtgtgattttcatacaggttatttttacgatctgtttccaaatccctttcatgtctttccacttctctgggtcccggggtgcatttgttactcatcgggcccagggacattgcagagtggcctagagcactctcaccccaagcggccttttccaaatgcccaaggatgccttagcatgtgactcctgaagggaaggcaaaggcagaggaatttggctgcttctacggccatgagactgatccctggccactgaaaagctttcctgacaataaaaatgttttgaggctttaaaaagaaaatcaagtttgaccagtgcagtttctaagcatgtagccagttaaggaaagaaagaaaaaaaaaaaaaaaaaa

SEQ ID NO: 514 - DNA, 3065 bp, Homo sapiens
gggcggggcggccgcgggtcgcgggcggatgacgcgccggggccggcggaggagcagccacttcctggggccgccggccggggccgctggctgcactcagcgccggagccgggagctagcggccgccgccatgtcccaccagaccggcatccaagcaagtgaagatgttaaagagatctttgccagagccagaaatggaaagtacagacttctgaaaatatctattgaaaatgagcaacttgtgattggatcatatagtcagccttcagattcctgggataaggattatgattcctttgttttacccctgttggaggacaaacaaccatgctatatattattcaggttagattctcagaatgcccagggatatgaatggatattcattgcatggtctccagatcattctcatgttcgtcaaaaaatgttgtatgcagcaacaagagcaactctgaagaaggaatttggaggtggccacattaaagatgaagtatttggaacagtaaaggaagatgtatcattacatggatataaaaaatacttgctgtcacaatcttcccctgccccactgactgcagctgaggaagaactacgacagattaaaatcaatgaggtacagactgacgtgggtgtggacactaagcatcaaacactacaaggagtagcatttcccatttctcgagaagcctttcaggctttggaaaaattgaataatagacagctcaactatgtgcagttggaaatagatataaaaaatgaaattataattttggccaacacaacaaatacagaactgaaagatttgccaaagaggattcccaaggattcagctcgttaccatttctttctgtataaacattcccatgaaggagactatttagagtccatagtttttatttattcaatgcctggatacacatgcagtataagagagcggatgctgtattctagctgcaagagccgtctgctagaaattgtagaaagacaactacaaatggatgtaattagaaagatcgagatagacaatggggatgagttgactgcagacttcctttatgaagaagtacatcccaagcagcatgcacacaagcaaagttttgcaaaaccaaaaggtcctgcaggaaaaagaggaattcgaagactaattaggggcccagcggaaactgaagctactactgattaaagtcatcacattaaacattgtaatactagttttttaaaagtccagcttttagtacaggagaactgaaatcattccatgttgatataaagtagggaaaaaaattgtactttttggaaaatagcacttttcacttctgtgtgtttttaaaattaatgttatagaagactcatgatttctatttttgagttaaagctagaaaagggttcaacataatgtttaattttgtcacactgttttcatagcgttgattccacacttcaaatacttcttaaaattttatacagttgggccagttctagaaagtctgatgtctcaaagggtaaacttactactttcttgtgggacagaaagaccttaaaatattcatattacttaatgaatatgttaaggaccaggctagagtattttctaagctggaaacttagtgtgccttggaaaaggccgcaagttgcttactccgagtagctgtgctagctctgtcagactgtaggatcatgtctgcaacttttagaaatagtgctttatattgcagcagtcttttatatttgacttttttttaatagcattaaaattgcagatcagctcactctgaaactttaagggtaccagatattttctatactgcaggatttctgatgacattgaaagactttaaacagccttagtaaattatctttctaatgctctgtgaggccaaacatttatgttcagattgaaatttaaattaatatcattcaaaaggaaacaaaaaatgttgagttttaaaaatcaggattgacttttttctccaaaaccatacatttatgggcaaattgtgttctttatcacttccgagcaaatactcagatttaaaattactttaaagtcctggtacttaacaggctaacgtagataaacaccttaataatctcagttaatactgtatttcaaaacacatttaactgttttctaatgctttgcattatcagttacaacctagagagattttgagcctcatatttctttgatacttgaaatagagggagctagaacacttaatgtttaatctgttaaacctgctgcaagagccataactttgaggcattttctaaatgaactgtggggatccaggatttgtaatttcttgatctaaactttatgctgcataaatcacttatcggaaatgcacatttcatagtgtgaagcactcatttctaaaccttattatctaaggtaatatatgcacctttcagaaatttgtgttcgagtaagtaaagcatattagaataattgtgggttgacagatttttaaaatagaatttagagtatttggggttttgtttgtttacaaataatcagactataatatttaaacatgcaaaataactgacaataatgttgcacttgtttactaaagatataagttgttccatgggtgtacacgtagacagacacacatacacccaaattattgcattaagaatcctggagcagaccatagctgaagctgttattttcagtcaggaagactacctgtcatgaaggtataaaataatttagaagtgaatgtttttctgtaccatctatgtgcaattatactctaaattccactacactacattaaagtaaatggacattccagaatatagatgtgattatagtcttaaactaattattattaaaccaatgattgctgaaaatcagtgatgcatttgttatagagtataactcatcgtttacagtatgttttagttggcagtatcatacctagatggtgaataacatattcccagtaaatttatatagcagtgaagaattacatgccttctggtggacattttataagtgcattttatatcacaataaaaattttttctctttaaaaaaaaaaaaaaaaaaaaaa

SEQ ID NO: 515 - DNA, 4071 bp, Homo sapiens
ccacgcgtccgcgggttcccagaaagtagcttgatgagtgtccaaagtagcagtggaagtttggaggggccgccatcttggtcccagctctccacgtctccaaccccgggctcggcggcggcggccaggtccctgctgaatcacacgccgccatccgggaggcccagggaaggtgcaatggatgagcttcatagtctggatccaagaaggcaagagttattggaagctagatttactggagttgcaagtgggagcactggaagtacgggcagttgcagtgttggagctaaagcctcaacaaataacgaaagctctaatcacagttttggaagcttgggatctttaagtgacaaagaatcagagacaccggagaagaaacaatcggaatcatccaggggaagaaagagaaaagcagaaaaccagaatgaaagtagtcagggaaaaagtattgggggacgtggccacaaaattagcgactattttgaataccagggtggaaatggctcaagtccagtaagaggcatacctcctgcaatccgttctcctcaaaattcacattcacattccactccttcctcatctgttcgaccgaatagcccttctcctactgcattagcatttggggaccaccctattgtacaaccaaagcaattatcctttaaaattattcagactgatctcacaatgctgaaattagcagcattagaaagtaataaaatccaggacctggaaaagaaggagggacgtatagatgatttgctcagggctaactgtgatctcagacggcaaatagatgaacaacaaaaattacttgaaaaatacaaagaacgattaaataagtgcatatcaatgagcaagaaacttcttattgaaaagagtacacaagaaaagctgtcaagcagagagaagagtatgcaagatcgattacgccttgggcactttacaacagttagacatggcgcttcatttactgaacaatggacagatggttttgcatttcagaatcttgtgaagcaacaagaatgggtgaatcagcaaagggaagatattgaaaggcaaaggaaacttctagccaaacgcaaacctcccacagctaataattctcaggcaccctctaccaattctgaaccaaaacaaaggaaaaacaaagcagtcaatggagcagagaatgatccctttgttagaccaaatttaccacaactgttgactttggcagaatatcatgaacaggaagaaattttcaaacttagactaggacatctcaaaaaggaagaggcagaaatccaggcagaacttgaacgtttggaaagagtcagaaatcttcacatacgtgagctgaaaagaataaacaatgaagataattcacagttcaaagatcacccaacattaaatgaaagatatttattacttcatctgcttggtagaggtggctttagtgaagtgtataaggcttttgacctttatgaacaaagatatgctgctgtgaagatacatcagcttaataaaagctggagagatgagaagaaagaaaactaccacaaacatgcctgcagagagtatagaatacacaaagaactggatcaccccagaatagttaaactctatgattatttctccttggatacagatacgttttgtacagtgttagaatactgtgaaggcaatgacttggatttctatctgaagcaacacaagttaatgtcagagaaagaagctcggtctattgtaatgcagattgtaaatgcactaagatatctcaatgagatcaaaccccctattatacattatgatcttaagccaggaaacatcctactggtagatggaacagcatgtggtgaaatcaaaatcactgattttggtctgtccaagattatggatgatgatagctatggtgtagatggaatggatctaacttcccagggggcaggcacttactggtatttacctcctgagtgttttgtagttggaaaagagccaccaaagatttccaacaaggttgatgtatggtcggttggagtcatcttctttcagtgtctttatggtagaaagccatttggtcacaatcaatctcaacaagacattcttcaagaaaatacaatattaaaagccacagaagtccagttccctgtaaaaccggttgtaagcagtgaagccaaggcatttataagacgctgtttggcatatcgaaaagaagatcgatttgatgtgcaccagctggcaaatgacccataccttctcccacacatgagaagatcaaattcttcaggaaacctacacatggctgggctgacagcatcccctacacccccttcttcaagcataattacttactgactttcctccaagattggcatgatatctttgaatttgcttccagatgcacacttaagtttgagagcatttgagtgtttgttttctttttctttttttttttttttttttttacacaagacgtggttaagaactgtttgtgaactgaagttcctcatagtgtcatttgtatgagagaggatcatggacaatgaataaatgcacacttctgactataattttgagcagtgaaggaaggatgactgcctgttacacagaaacaggaataccatgttaagatagaggaaaaaaattttgtttatttgggggaacactgtaaataacgtttataatacttaaatacatttggttgttactagagagttctaatatgaagggtagtttttcattatttaaaaacacatggaaaaatatgagacatatttctaacatacgaactatagtgcctggatacattcttcagcatttggcagttaatctgctgaaaccaaagtaagaactgaatgacagtgacagttgtgttttatagtaatagaatgtgagagttagaatctttggacaaagttaggctttgtcatttgcctattcagacttttaccaagttgtacctcgagatcacatgtccgttttctttcactggttatattaaagggagagctattatttctaaatactttacacctttgacaaaatgagctgcttgtgttgaaatcagttgaattcactaaattataatattgccagtgttttcaacacgttagaattgataacaggtatttttcttttgttaccaggccttgttcatcaaaacaggtgacagtgagtaaccaaatgcagaccagttctatgcaggataatgataaattcccttctagctctattgtaaattgttgtacagatgtcatatttcaattactaagtttcagcagcttattcttgtacaaatgtttaaaatatggcttttctaattggatattgtattttttttaagtcttcttgaaggcactctaattgctgctaaatgatgttgcttctttgctaaaaaattaaatgacctagaaggtgcaagttgactgtacatcatagatattaaaaagcagacagtcattaacaatcaagatgtaaaagtgatccatgttggacataattgagtttttaaatcagtttattgggttctagggctgtagaacacatagatactagatttttaatttgttcatggttattctacatttctagaaagttcttatcagcaagatggtcccataagcaaatttcttgtggtttgtacagatttgttaaaatgtgaacgttttctaactgcctcgtagggtagaaaccaatatttttcaggatgctgtatttcactcctgtaaggactttttctttattgtcacattcataatgctgatacttacatgtaagttgttcatgttgcagaaaaaggttatacgtaccacggattctctttaatattgtacagttaaactgtatttctgatgttgcaagccattttgttttttcattgtacatagacacattgtctctttaaaatgctgctgaaattgtagagagtatagccaaaacagtaataaacaatgacagttaaaatgtaaagactatgaaaattacattggaagggagctttcaagatggtaggatattgactaactgagctccttcacttaaaaatcagctgaataaattccttaagtatacttcaaaaaaaaaaaaaaaaaa

SEQ ID NO: 516 - DNA, 740 bp, Homo sapiens
agctggctggagcagcatcggtccgggacggtctctaggctgaggcggcggccgctcctctagttccacaatgtccacgggcggagacttcgggaatccgctgaggaaattcaagctggtgttcctgggggagcaaagcgttggaaagacatctttgatcaccagattcatgtatgacagttttgacaacacctatcaggcaacaattggcattgactttttatcaaaaactatgtacttggaggatcgaacagtacgattgcaattatgggacacagcaggtcaagagcggttcaggagcttgattcctagctacattcgtgactccactgtggcagttgttgtttatgatatcacaaatgttaactcattccagcaaactacaaagtggattgatgatgtcagaacagaaagaggaagtgatgttatcatcatgctagtaggaaataaaacagatcttgctgacaagaggcaagtgtcaattgaggagggagagaggaaagccaaagagctgaatgttatgtttattgaaactagtgcaaaagctggatacaatgtaaagcagctctttcgacgtgtagcagcagctttgccgggaatggaaagcacacaggacagaagcagagaagatatgattgacataaaactggaaaagcctcaggagcaaccagtcagtgaaggaggctgttcctgctaatgtccctagtcatcttcaaccttcttcagaagctcactgcttt

SEQ ID NO: 517 - DNA, 1324 bp, Homo sapiens
cttgagaggctctggctcttgcttcttaggcggcccgaggacgccatggccgagtgcccgacactcggggaggcagtcaccgaccacccggaccgcctgtgggcctgggagaagttcgtgtatttggacgagaagcagcacgcctggctgcccttaaccatcgagataaaggataggttacagttacgggtgctcttgcgtcgggaagacgtcgtcctggggaggcctatgacccccacccagataggcccaagcctgctgcctatcatgtggcagctctaccctgatggacgataccgatcctcagactccagtttctggcgcttagtgtaccacatcaagattgacggcgtggaggacatgcttctcgagctgctgccagatgactgatgtatggtcttggcagcacctgtctcctttcaccccagggcctgagcctggccagcctacaatggggatgttgtgtttctgttcaccttcgtttactatgcctgtgtcttctccaccacgctggggtctgggaggaatggacagacagaggatgagctctacccagggcctgcaggacctgcctgtagcccactctgctcgccttagcactaccactcctgccaaggaggattccatttggcagagcttcttccaggtgcccagctatacctgtgcctcggcttttctcagctggatgatggtcttcagcctctttctgtcccttctgtccctcacagcactagtatttcatgttgcacacccactcagctccgtgaacttgtgagaacacagccgattcacctgagcaggacctctgaaaccctggaccagtggtctcacatggtgctacgcctgcatgtaaacacgcctgcaaacgctgcctgccggtaaacacgcctgcaaacgctgcctgcccgtaaacacgcctgcaaacgctgcctgcccacacaggttcacgtgcagctcaaggaaaggcctgaaaggagcccttatctgtgctcaggactcagaagcctctgggtcagtggtccacatcccgggacgcagcaggaggccaggccggcgagccctgtggatgagccctcagaacccttggcttgcccacgtggaaaagggatagaggttgggtttcccccctttatagatggtcacgcacctgggtgttacaaagttgtatgtggcatgaatactttttgtaatgattgattaaatgcaagatagtttatctaacttcgtgcgcaatcagcttctatccttgacttagattctggtggagagaagtgagaataggcagcccccaaataaaaaatattcatggaaaaaaaaaaaaaaa

SEQ ID NO: 518 - DNA, 5621 bp, Homo sapiens
gtggctggagtccgggcagagcttgagggcagttggtgcggtcgggttggttcttacaccccggcgggagcgcccagacaagccgagctgactggacttctccggccggccccattcccgaggctgcggcagcttcggttccgagaccgaccggagaggagcccgagtcccggcctctgggggattcgctctctgcagaccagtgggaccccgaaacttgaacgcaatctccagcccccttttttgccttcctttgtcacttgcccgggtttctcccaacgtgttcttttttttcctcttcattctccctccttcgaaggacacaaaagtggcttccgcggaaagatttggaggcggtgggagcttttctccccggagagcgactgtgtagaaaggatttttgggaagccgctttttaacacctctgctctccgtcccccaagcctctgtgtaatcctctgaggagaaaagcccatagcttgaaagttcgggggcattttgttgtgttctgtaggagagagggggaggaccctgttcgggtagtttggccggactggtactggccgttggaaaacccgaagtacatttccgtgtggaacttttgcagatatatatttttagatttttaaataccagataaaaaatatatgccttctatatatctcctggcgacctgcccctgacagcgcgatgtacaatacggtgtggagtatggaccgcgatgacgcagactggagggaggtgatgatgccctattcgacagaactgatattttatattgaaatggatcctccagctcttccaccaaagccacctaagccaatgacttcagcagttccaaatggaatgaaggacagttctgtttctcttcaggatgcagaatggtactggggggatatttcaagggaggaggtaaatgacaaattgcgggatatgccagatgggaccttcttggtccgagatgcctcaacaaaaatgcagggagattatactttgactttgcggaagggaggcaataataagttaataaagatctatcaccgggatggtaaatatggcttttctgatcctctgacatttaattccgtggtggagctcattaaccactatcaccatgaatctcttgctcagtacaatcccaaacttgatgtgaagctgatgtacccagtgtccagataccaacaggatcagttggtaaaagaagataatattgatgcagtaggtaaaaaactgcaagaataccactctcagtatcaggagaagagtaaagagtatgataggctgtatgaagaatatactagaacatcccaggaaatacagatgaagaggactgcaatagaagcttttaatgaaacaattaaaatatttgaagagcagtgtcacacacaagaacaacatagcaaagaatatattgagcgatttcgcagagaggggaatgaaaaggagattgaacgaattatgatgaattatgataaattgaaatcacgtctgggtgagattcatgatagcaaaatgcgtctagagcaggatttgaagaatcaagctttggacaaccgagaaatagataaaaaaatgaatagcatcaaacctgacctgatccagctgcgaaagatccgagatcaacaccttgtatggctcaatcacaaaggagtgagacagaaacgcctgaatgtctggctgggaattaagaatgaggatgctgctgagaactattttatcaatgaggaagatgaaaacctgccccattatgatgagaaaacctggtttgttgaggatatcaatcgagtacaagcagaggacttgctttatgggaaacctgatggtgcattcttaattcgtgagagtagcaagaaaggatgctatgcttgctctgtggtggccgatggggaagtgaagcactgtgtgatctacagcactgctcggggctatggctttgcagagccctacaacctgtacagctctctgaaggagctagtgctccattaccagcagacatccttggttcagcacaacgactccctcaacgtcaggcttgcctaccctgttcatgcacagatgccctcgctttgcagataaagaggaagtgggaagagaggtggttctctggcatttttttctacagtttttattagactacgatgagggcattctttctacatagactgcttgttttgcacaagaagtgattttgtgaatgtgaagtggagaggccgagcagcagccggccgggatgggggcattagaggcctgaggttctctaggactcagccatgccgctgcactgacatactaagctggaagcagatgttttttttgaaagtctgtttcattggggtttttgttttgtttagccagacaccctcaacagaatattaggcttgatggttatagcgggtggggttgtatttggaagcctctgaagagaccatgtctttttaaaatctaactcttgagagtgcagcaggggcatggctctgctgggagttgtgttttgctttggcagtctctcttccccccacgaagaaggctgtttaggttttgtgatagaatgggatttgatgaaaaagacaaccaaaggaaaatggggaggcttgggatttcatttaaataatctaagccaagatgataaaaaaaaccttcaactgaaggtattttgtttcttaccaacataatttaggcttcagcatctcaccagcccctccctctgaagaagtattatgttcagaagccaacaaaacagtttgttgccagaccaatgtttgatgggaaaacgtggcactcatagttgaatgtatacttctgtaccaaaacttgaacataaaaagactagaatttgtgagttttagcaaacgctaaaattgatcactgtaactaaccccttctgtccttcctgcctgtttctctgagatgaggaatagcattctttttgtggggatggtgagctttgaatcataaaatgaagttggtgcttgtatggtgtttccttagcctaaagaatgatctgttgtttgaaacctttgtaacttgtttgtatgagtaaagaaaaggtgcaatgcagtgcttttagatggcttgatataccaaataacaatatagaacaacattattatatgtgcttccccaagtttaaaggccctgcagaaatagtaaacatggtttaatttcccttcatttccccctcctttgctggatggggttttgggagctataggttgctaaggaggggagtcagattgtggtcaggtgcctcagtaaatcacagacccaggggccctgtggtccagggtgagagtcacaccacattacacatgtgcttccatacagtggtttctgaagcttttgcagggagagaagatggcttagtgtttagactgttagtagaagccatctggaagcttttctctttgcctttttttgtgatcctgccattaaggctatgtgcagtctgccctcctgctccagtggccttgattttaggccaggaatcttctgctccatgtggcttaagccttccagctgagtgaagctaggcaaatggagtgggggcaggcatctattcctgcccccatcatgccccacacccatcagtcaacactcatttgacaaatagagtccagctgcctctgagccaatcctgggaccataataggctcagagtgagtcagctgtttgaacccaaagctgtgcagtcaggcaccctggctgagctagagaagccagtacctgcatcttggtttataaggcttacagctaggaaagctctagttctgggggtgaaagaaaaatattagtttacctgagcacttatttccatgacagggtctaaaatatggaccatgatgtagacacagatttttaattttggaaaaacctccagttactagtgacgaggatagaaagggaagtgcttctctttggctttttcttggttacactgcagtttcaggattgggtgagacagagacaaatgaacccccctctaaagtcatttaactaatagccagcacatcccttccccaaactgtcaattgaaatcttaactgaaagttttactgaataataccaagctaattgctgttgggcacacctggatggctttgcacctggtgttgaacctgctgaagcaggtggatgctcaagattacgtgcaaggaatccctcccatctggtactaaaatttcagtgtgttctgagtgtcttttaaaccaaaatggaaatacagatacagggctgtagtattcagtaatgtgtctgctccttgttgggcagacaccagcggtgtgcagggagagaccaagtaccatctttatctacacttgggctggcttgtggagaagggctgcttttttcagtcctacattccttcattttttttttcattcttgaattcattgttttgtgggatctaagacccaggggtcatttgagaggtttgacagtatcttttctgaccagttgccacatgacttgcttgaccctgagcctgtggaaatggcatagggaccagtctactacccactgggcctggtgtgtagagggggagagggtagcaaggtgcttctctacgcccatgacttgggagcaggtcttggcctccttcatgagagtctagtgccatgtcctgtcccatgatctggaccctgggactgtcttggcatcttaactgcagtttcaatgaggcagagggcaaagagagaccaagatcagaggggttcattatacccctggctagagaacccagctactgacatgcaagcagcttggggctggctggacacaggtactaggcccattgtttccaggtgaagctttcatcacagaacagtgttgtctccacctggccttagatggcacgccatgattcgggcctggatagactgcctgcgtccttaccactgatctggccaagaatgaggccctcccaacactttcactccctctccaagccttgatgggacctccacttatttaggcctcatgtgctttgaagaagctttgagagccaatgtgtcttccacgggtctcttttttgctacaagtaatcagccccatgtgttctcttaaactgagaattgcacctgggcaattcctgttttctaaggtggtctctgctgctatttaacaacccagagtaggcctctgtgaggcttcagtggcctcagaaaccagagggtccagatagggggcctgcttgggccctctgctgccaactgctcaaacctgctttagctccagccacttgtggcaaacaacctcgtttccttacaaattccagcatgtgactttggtgccgttacttgtgaaaaatctattctgttgtctttgatgtgtccaagaaaattcgtgtagtttacgtaaaaatatctgactcacaagaaagccaactgtatgtcttgtgatgggacagttcataatgtagttgctagaccactttacaaattgttcttgtcaccagatgtgttcagacattgctgtgcaattgttggggagggtagggggaaaggcgagaggagatacttattggtctttttgtttaataccttccccaagaggggacagtctggccaacttgctccagtaatgcaataaagacattgcaataaagtaaaaaaaaaaaaaaa

SEQ ID NO: 519 - DNA, 10300 bp, Homo sapiens
aactgctagtggctgagtccctggcggggcgcggcggtggaaggtgtcgcgtacgggcttcccgagctgacgtggcttgaattgggaggggggcagctggagcctcaggcggcagcgcttctagaaatgctgagccgattatcaggattagcaaatgttgttttgcatgaattatcaggagatgatgacactgatcagaatatgagggctcccctagaccctgaattacaccaagaatctgacatggaatttaataatactacacaagaagatgttcaggagcgcctggcttatgcagagcaattggtggtggagctaaaagatattattagacagaaggatgttcaactgcagcagaaagatgaagctctacaggaagagagaaaagctgctgataacaaaattaaaaaactaaaacttcatgcgaaggccaaattaacttctttgaataaatacatagaagaaatgaaagcacaaggagggactgttctgcctacagaacctcagtcagaggagcaactttccaagcatgacaagagttctacagaggaagagatggaaatagaaaagataaaacataagctccaggagaaggaggaactaatcagcactttgcaagcccagcttactcaggcacaggcagaacaacctgcacagagttctacagagatggaagaatttgtaatgatgaagcaacagctccaggagaaggaagaattcattagcactttacaagcccagctcagccagacacaggcagagcaagctgcacagcaggtggtccgagagaaagatgcccgctttgaaacacaagttcgtcttcatgaagatgagcttcttcagttagtaacccaggcagatgtggaaacagagatgcaacagaaattgagggtgctgcaaaggaagcttgaggaacacgaagaatccttggtgggccgtgctcaggtcgttgacttgctgcaacaggagctgactgctgctgagcagagaaaccagattctctctcagcagttacagcagatggaagctgagcataatactttgaggaacactgtggaaacagaaagagaggagtccaagattctactggaaaagatggaacttgaagtggcagagagaaaattatccttccataatctgcaggaagaaatgcatcatcttttagaacagtttgagcaagcaggccaagcccaggctgaactagagtctcggtatagtgctttggagcagaagcacaaagcagaaatggaagagaagacctctcatattttgagtcttcaaaagactggacaagagctgcagtctgcctgtgatgctctaaaggatcaaaattcaaagcttctccaagataagaatgaacaggcagttcagtcagcccagaccattcagcaactggaagatcagctccagcaaaaatccaaagaaattagccaatttctaaatagactgcccttgcaacaacatgaaacagcatctcagacttctttcccagatgtttataatgagggcacacaggcagtcactgaggagaatattgcttctttgcagaagagagtggtagaactagagaatgaaaagggagccttgctccttagttctatagagctggaggagctgaaagctgagaatgaaaaactgtcttctcagattactctcctagaggctcagaatagaactggggaggcagacagagaagtcagtgagatcagcattgttgatattgccaacaagaggagctcttctgctgaggaaagtggacaagatgttctagaaaacacattttctcagaaacataaagaattatcagttttattgttggaaatgaaagaagctcaagaggaaattgcatttcttaaattacagctccagggaaaaagggctgaggaagcagatcatgaggtccttgaccagaaagaaatgaaacagatggagggtgagggaatagctccaattaaaatgaaagtatttcttgaagatacagggcaagattttcccttaatgccaaatgaagagagcagtcttccagcagttgaaaaagaacaggcgagcactgaacatcaaagtagaacatctgaggaaatatctttaaatgatgctggagtagaattgaaatcaacaaagcaggatggtgataaatccctttctgctgtaccagatattggtcagtgtcatcaggatgagttggaaaggttaaaaagtcaaattttggagctcgagctaaactttcataaagcacaagaaatctatgagaaaaatttagatgagaaagctaaggaaattagcaacctaaaccagttgattgaggagtttaagaaaaatgctgacaacaacagcagtgcattcactgctttgtctgaagaaagagaccagcttctctctcaggtgaaggaacttagcatggtaacagaattgagggctcaggtaaagcaactggaaatgaaccttgcagaagcagaaaggcaaagaagacttgattatgaaagccaaactgcccatgacaacctgctcactgaacagatccatagtctcagcatagaagccaaatctaaagatgtgaaaattgaagttttacagaatgaactggatgatgtgcagcttcagttttctgagcagagtaccctgataagaagcctgcaaagccagctgcaaaataaggaaagtgaagtgcttgagggggcagaacgtgtaaggcatatctcaagtaaagtggaagaactgtcccaggctctttcacagaaggaacttgaaataacaaaaatggatcagctcttactagagaaaaagagagatgtggaaaccctccaacaaaccatcgaggagaaggatcaacaagtgacagaaatcagctttagtatgactgagaaaatggttcagcttaatgaagagaagttttctcttggggttgaaattaagactcttaaagaacagctaaatttattatccagagctgaggaagcaaaaaaagagcaggtggaagaagataatgaagtttcttctggccttaaacaaaattatgatgagatgagcccagcaggacaaataagtaaggaagaacttcagcatgaatttgaccttctgaagaaagaaaatgagcagagaaagagaaagctccaggcagctcttattaacagaaaggagcttctgcaaagagtcagtagattggaagaagaattagccaacttgaaagatgaatctaagaaagaaatcccactcagtgagactgagaggggagaagtggaagaagataaagaaaacaaagaatactcagaaaaatgtgtgacttctaagtgccaagaaatagaaatttatttaaaacagacaatatctgagaaagaagtggaactacagcatataaggaaggatttggaagaaaagctggcagctgaagagcaattccaggctctggtcaaacagatgaatcagaccttgcaagataaaacaaaccaaatagatttgctccaagcagaaatcagtgaaaaccaagcaattatccagaagttaatcacaagtaacacggatgcaagtgatggggactccgtagcacttgtaaaggaaacagtggtgataagtccaccttgtacaggtagtagtgaacactggaaaccagaactagaagaaaagatactggcccttgaaaaagaaaaggagcaacttcaaaagaagctacaggaagccttaacctcccgcaaggcaattcttaaaaaggcacaggagaaagaaagacatctcagggaggagctaaagcaacagaaagatgactataatcgcttgcaagaacagtttgatgagcaaagcaaggaaaatgagaatattggagaccagctaaggcaactccagattcaagtaagggaatccatagacggaaaactcccaagcacagaccagcaggaatcgtgttcttccactccaggtttagaagaacctttattcaaagccacagaacagcatcacactcaacctgttttagagtccaacttgtgcccagactggccttctcattctgaagatgcgagtgctctgcagggcggaacttctgttgcccagattaaggcccagctgaaggaaatagaggctgagaaagtagagttagaattgaaagttagttctacaacaagtgagcttactaaaaaatcagaagaggtatttcagttacaagagcagataaataaacagggtttagaaatcgagagtctaaagacagtatcccatgaagctgaagtccatgccgaaagcctgcagcagaaattggaaagcagccaactacaaattgctggcctagaacatctaagagaattgcaacctaaactggatgaactgcaaaaactcataagcaaaaaggaagaagacgttagctacctttctggacaacttagtgagaaagaagcagctctcactaaaatacagacagagataatagaacaagaagatttaattaaggctctgcatacacagctagaaatgcaagccaaagagcatgatgagaggataaagcagctacaggtggaactttgtgaaatgaagcaaaaaccagaagagattggagaagaaagtagagcaaagcaacaaatacaaaggaaactgcaagctgcccttatttcccgaaaagaagcactaaaagaaaacaaaagtctccaagaggaattgtctttggccagaggtaccattgaacgtctcaccaagtctctggcagatgtggaaagccaagtttctgctcaaaataaagaaaaagatacggtcttaggaaggttagctcttcttcaagaagaaagagacaaactcattacagaaatggacaggtctttattggaaaatcagagtctcagcagctcctgtgaaagtctaaaactagctctagagggtcttactgaagacaaggaaaagttagtgaaggaaattgaatctttgaaatcttctaagattgcagaaagtactgagtggcaagagaaacacaaggagctacaaaaagagtatgaaattcttctgcagtcctatgagaatgttagtaatgaagcagaaaggattcagcatgtggtggaagctgtgaggcaagagaaacaagaactgtatggcaagttaagaagcacagaggcaaacaagaaggagacagaaaagcagttgcaggaagctgagcaagaaatggaggaaatgaaagaaaagatgagaaagtttgctaaatctaaacagcagaaaatcctagagctggaagaagagaatgaccggcttagggcagaggtgcaccctgcaggagatacagctaaagagtgtatggaaacacttctttcttccaatgccagcatgaaggaagaacttgaaagggtcaaaatggagtatgaaaccctttctaagaagtttcagtctttaatgtctgagaaagactctctaagtgaagaggttcaagatttaaagcatcagatagaagataatgtatctaaacaagctaacctagaggccaccgagaaacatgataaccaaacgaatgtcactgaagagggaacacagtctataccaggtgagactgaagagcaagactctctgagtatgagcacaagacctacatgttcagaatcggttccatcagcgaagagtgccaaccctgctgtaagtaaggatttcagctcacatgatgaaattaataactacctacagcagattgatcagctcaaagaaagaattgctggattagaggaggagaagcagaaaaacaaggaatttagccagactttagaaaatgagaaaaataccttactgagtcagatatcaacaaaggatggtgaactaaaaatgcttcaggaggaagtaaccaaaatgaacctgttaaatcagcaaatccaagaagaactctccagagttaccaaactaaaggagacagcagaagaagagaaagatgatttggaagagaggcttatgaatcaattagcagaacttaatggaagcattgggaattactgtcaggatgttacagatgcccaaataaaaaatgagctattggaatctgaaatgaagaaccttaaaaagtgtgtgagtgaattggaagaagaaaagcagcagttagtcaaggaaaaaactaaggtggaatcagaaatacgaaaggaatatttggagaaaatacaaggtgctcagaaagaacccggaaataaaagccatgcaaaggaacttcaggaactgttaaaagaaaaacaacaagaagtaaagcagctacagaaggactgcatcaggtatcaagagaaaattagtgctctggagagaactgttaaagctctagaatttgttcaaactgaatctcaaaaagatttggaaataaccaaagaaaatctggctcaagcagttgaacaccgcaaaaaggcacaagcagaattagctagcttcaaagtcctgctagatgacactcaaagtgaagcagcaagggtcctagcagacaatctcaagttgaaaaaggaacttcagtcaaataaagaatcagttaaaagccagatgaaacaaaaggatgaagatcttgagcgaagactggaacaggcagaagagaagcacctgaaagagaagaagaatatgcaagagaaactggatgctttgcgcagagaaaaagtccacttggaagagacaattggagagattcaggttactttgaacaagaaagacaaggaagttcagcaacttcaggaaaacttggacagtactgtgacccagcttgcagcctttactaagagcatgtcttccctccaggatgatcgtgacagggtgatagatgaagctaagaaatgggagaggaagtttagtgatgcgattcaaagcaaagaagaagaaattagactcaaagaagataattgcagtgttctaaaggatcaacttagacagatgtccatccatatggaagaattaaagattaacatttccaggcttgaacatgacaagcagatttgggagtccaaggcccagacagaggtccagcttcagcagaaggtctgtgatactctacagggggaaaacaaagaacttttgtcccagctagaagagacacgccacctataccacagttctcagaatgaattagctaagttggaatcagaacttaagagtctcaaagaccagttgactgatttaagtaactctttagaaaaatgtaaggaacaaaaaggaaacttggaagggatcataaggcagcaagaggctgatattcaaaattctaagttcagttatgaacaactggagactgatcttcaggcctccagagaactgaccagtaggctgcatgaagaaataaatatgaaagagcaaaagattataagcctgctttctggcaaggaagaggcaatccaagtagctattgctgaactgcgtcagcaacatgataaagaaattaaagagctggaaaacctgctgtcccaggaggaagaggagaatattgttttagaagaggagaacaaaaaggctgttgataaaaccaatcagcttatggaaacactgaaaaccatcaaaaaggaaaacattcagcaaaaggcacagttggattcctttgttaaatccatgtcttctctccaaaatgatcgagaccgcatagtgggtgactatcaacagctggaagagcgacatctctctataatcttggaaaaagaccaactcatccaagaggctgctgcagagaataataagcttaaagaagaaatacgaggcttgagaagtcatatggatgatctcaattctgagaatgccaagctagatgcagaactgatccaatatagagaagacctgaaccaagtgataacaataaaggacagccaacaaaagcagcttcttgaagttcaacttcagcaaaataaggagctggaaaataaatatgctaaattagaagaaaagctgaaggaatctgaggaagcaaatgaggatctgcggaggtcctttaatgccctacaagaagagaaacaagatttatctaaagagattgagagtttgaaagtatctatatcccagctaacaagacaagtaacagccttgcaagaagaaggtactttaggactctatcatgcccagttaaaagtaaaagaagaagaggtacacaggttaagtgctttgttttcctcctctcaaaagagaattgcagaactggaagaagaattggtttgtgttcaaaaggaagctgccaagaaggtaggtgaaattgaagataaactgaagaaagaattaaagcatcttcatcatgatgcagggataatgagaaatgaaactgaaacagcagaagagagagtggcagagctagcaagagatttggtggagatggaacagaaattactcatggtcaccaaagaaaataaaggtctcacagcacaaattcagtcttttggaaggtctatgagttccttgcaaaatagtagagatcatgccaatgaggaacttgatgaactgaaaaggaaatatgatgccagtctgaaggaattggcacagttgaaagaacagggactcttaaacagagagagagatgctcttctttctgaaaccgccttttcaatgaactccactgaggagaatagcttgtctcaccttgagaaacttaaccaacagctcctatccaaagatgagcaattgcttcacttgtcctcacaactagaagattcttataaccaagtgcagtccttttccaaggctatggccagtctgcagaatgagagagatcacctgtggaatgagctggagaaatttcgaaagtcagaggaagggaagcagaggtctgcagctcagccttccaccagcccagctgaagtacagagtttaaaaaaagctatgtcttcactccaaaatgacagagacagactactgaaggaattgaagaatctgcagcagcaatacttacagattaatcaagagatcactgagttacatccactgaaggctcaacttcaggagtatcaagataagacaaaagcatttcagattatgcaagaagagctcaggcaggaaaacctctcctggcagcatgagctgcatcagctcaggatggagaagagttcctgggaaatacatgagaggagaatgaaggaacagtaccttatggctatctcagataaagatcagcagctcagtcatctgcagaatcttataagggaattgaggtcttcttcctcccagactcagcctctcaaagtgcaataccaaagacaggcatccccagagacatcagcttccccagatgggtcacaaaatctggtttatgagacagaacttctcaggacccagctcaatgacagcttaaaggaaattcaccaaaaggagttaagaattcagcaactgaacagcaacttctctcagctactggaagagaaaaacaccctttccattcagctctgcgataccagtcagagtcttcgtgagaaccagcagcactatggtgaccttttaaatcactgtgcagtcttggagaagcaggttcaagagctgcaggcggggccactaaatatagatgttgctccaggagctccccaggaaaagaatggagttcacagaaagagtgaccctgaggaactaagggaaccgcagcaaagcttttctgaagctcagcagcagctatgcaacaccagacaggaagtgaatgaattaaggaagctgctggaagaagaacgagaccaaagagtggctgctgagaatgctctctctgtggccgaggagcagatcagacggttagagcacagtgaatgggactcttcccggactcctatcattggctcctgtggcactcaggagcaggcactgttaatagatcttacaagcaacagttgtcgaaggacccggagtggcgttggatggaagcgagtcctgcgttcactctgtcattcacggacccgagtgccacttctagcagccatctactttctaatgattcatgtcctgctcattctgtgttttacgggccatctatagacttagttgttactctttggaccactcccttcaaaacttggaattctctcacctctaacatcagaacatcaattccagtggaacagtcttcccatttacaggtcttctctccaactcttcacggaaagtgcctgcaaaaacagaggtggatacgaggacaggttggagctgcagggactggcgagtctgctttcttctactgccctgagcctgaacgcttctgcttaatctgagaatcacatttggtttgttgagcctaatatttgttgagattttgcaggaccctgatcttttgtggtcctgtaaaagatactgaggaatgtctttcagccaagccaagaggatggtttcaataaacctaataatctgaagttcagctttttttttttttttt

SEQ ID NO: 520 - DNA, 4199 bp, Homo sapiens
tggggcgggctgatgagcacctggattttcacccggcgtgctggtaattcctacacttgtgggtgtttgagagacatgaagaggggaggatgacctcttcccggaagcgggacttccataaaagaagcgtggtgggcgggtcccgggcacctgtggtttggtgagtcctccaggtaactgtgatgcgggggtcagcgggagaggcacccggaagctcccggcgtctgcaccccggcagcgcgaggaaatgcccaaagaaactatagtgacactgaaactgaaggagagatttttaattccttagtgcaatactttggtgacaacttggggcgaaaagttaaagcgatgccattagttgaagaaacttctttattggaagattcgtcagtgacttttcctgtggtaataataggaaatggaccctcaggaatatgcctttcttatatgttatcaggctacagaccgtatttatcatcagaagcaatacacccaaatacaatcttaaatagtaaattagaagaagcaagacatctttccattgttgatcaggacttagaatacttgtctgagggccttgagggccgatcatccaatccagttgcagtacttttcgatacacttcttcatccagatgctgactttgggtatgattatccatccgttttgcattggaaattagagcaacatcattatatccctcacgtagttcttggtaaaggtccacctggtggggcttggcataatatggaaggctccatgttgacaatcagctttggaagttggatggaactacctggacttaaatttaaggactgggtatcaagtaaacgaaggagcctaaaaggggatcgagttatgccagaggaaatagctcgctactataaacattatgtaaaagtcatgggtcttcagaagaatttcagagagaatacttacataacttccgtatcaagactctacagagatcaagatgatgatgatattcaagacagagatatttcaacaaagcatttacagatagagaagtcaaactttatcaagagaaactgggaaattaggggttatcagcgaatagctgatggttctcatgttcccttctgcctctttgctgagaatgtagcgctggcaactggaacgctggattctcctgcccatctggaaattgaaggggaagattttccttttgtgtttcattcaatgcctgaatttggagctgctataaacaaaggaaagttgcgtggcaaagtggatccagtgttaattgtaggttctgggcttactgccgctgacgcagtactgtgtgcttacaacagtaatatccctgtgattcatgtgtttcgcagacgagtaactgatccaagcttaattttcaaacagcttcccaaaaagctgtatcctgaatatcataaagtctatcatatgatgtgtactcagtcatattctgtagactcaaatcttttatctgattataccagctttcccgagcaccgtgtgctttcctttaagtcggacatgaaatgtgttctccaaagcgtttctggattgaagaaaatatttaagctgtctgcagcagtagtattgataggttctcatcctaatctgtcttttctgaaggatcaagggtgttacctaggccataagtcaagccagccaatcacatgtaagggtaatcctgtggaaatagatacatatacctatgagtgtattaaagaagccaacctttttgcattgggtcctttggttggagacaattttgttcgatttttaaagggaggggcgctgggtgttacacgctgtttagctacaagacagaagaaaaagcatttgtttgttgaaagaggaggaggagatgggatagcttaaagcaagtttacaagtaattaaaatggacagtttgccattaaagatttttaatagtggttttgcagtgtactggcttgaattttctggacttgagttaactgaaggagagcctcaaactatagtaacttcatttttaaaagttactagaatttggtatcctgatttatattgcagtgtttcaaaggtgtcactgtcagacaaatagaaacactgccaacttggtgtaacttaagctttcatttaactaaaacattcttttcttgcaaaacttatttttcatgatcatttttggttatttattatacttgattccaaaatagtacagccttgaatctataaaactgtgcagtcattatgccagaaattatcttaaatatataatgggtcaccttgctgttcaaagggtggtgcaaggtcctgcagcatcttacatctgtagcttgttagaaatgtaaactctcaggccccacaacttacttcctgcattttaacaagatccccaagggatatgtatgctcataaaaatttgagacactggtttaaatgaaaatggatataaggtatgtataactgggggtggggtgagggtaggaggcatttacaactcagattttatttattttgaaattatcaattgtataaatctaatttattaccaaatagggtcttttaaaaaatatttttatcgttgaaaccttgacaggtacttcatattcttctaataatttaaacagtccaataatgtggtatacactttgacatccaagaactcaccaagatgtttttcagagatttattctcgatttaactatcatagcatttaatgaatctgatttgtagttcaataaattgtgggttgaactacttatccctgtgtgaacattgaattactttctgtcactgaaactgaggtatttgggtgtggtaagtacttcgaaaattgtaatactgtttgggcattgtctaaattattaaaggttaaaatagaaaataaagtcagaatttttcttttccattccaaaggtgtacttagagatctctattagtattcattcgagatgacatagcagctcatatcatggttgtttattggatttatctgttctaattatataagtgtgtttactgtctgtgttttcacacaaactgctagaatttttaatgttaagacgaaaacatctgaagttctccatggcaaattgaatttttcagtcattttcttttctttttttggtacaattacttcatctggaatgtcttcattgaactcgttattctatttttcttagaattaaaagtggattaatgtgggtttttctgttcattttattgcagtattaaatgcttaagcttattaggaccataattcactttaaatataattgtatagaatatatttgcgtcgatcaaataattgcttcagatgaattcttagactcttgataatatcacacctaatttaacttgattttacaagctgtacaatccagttttagttttctattgtgataataacttttttcaaaccagtttcacatcttaatgaaataacattctctgactgcacttgcttcagtactctcttgcctgcctgtttttgacctctgcatgagttggattagatgtttttcttactgtcacttctaaatagaaaatgacagtgttataaaaaagggaaggataaaacctttgacatccccttgtgtctcaaaagtccacagttattcaaacaatggctttttttgtgatgagagtatttgttaaaaaaaaaaaaagacttcaagaaaaataaaagttcagtggagctgcaaataaatctggtgaataatttcatctttggtaatctcccatttcctgagttcttcctcaatccaagctgtcctgtgtagtatataacatttgggcattttctctgatatactatactctcatgttctataaatttctgtcccgtaattctaacactttacattttttctttgctatcagctatagctattcatggaagggaagaatcactaaatacttgtctagttatagcatgatgtgagcatctcctccttatccctcgatgcctggcttggtgtctggcaaacagtccataattagcagatgttgaaagaccgtttacaaagcagaatttggggatttaaagtgcaatgatacaacaaaaagatttaattacagcttccagtgttttgactatgtgaaccatatccaactacttttttgaaaatctagttctatgtaatatatttctgtggcatcaaattttagttgattgtattagtcaataggaagtggtggaaaatttctaaataaattcaactattaaa

SEQ ID NO: 521 - DNA, 1281 bp, Homo sapiens
gccaattagcggcccaacgccccttccgcgcctcatccgggttcccgggacgggaaagtggcgtggtaaccaggcaactactgatcaatcccctccccggctgatttgcgcatcaggaggaggactgagcttatctgactccagagctttcaggagggaagaaagatgtcagatgaagatgatctagaagactctgagccagaccaggatgattctgagaaagaagaggacgagaaggagacagaggagggggaggactacagaaaagagggggaagagttccctgaggaatggctgcccacccccctcacggaggacatgatgaaggaagggctttctctgctctgtaagacaggcaatgggctggctcatgcttatgtcaagctggaggttaaagagagggacctgacagacatctacttgctgcgctcctacatccatctgcgctatgtggatatttctgagaaccacctgacagacctgtctccactcaactacctcacccacctgctctggctcaaggctgatggcaatcggctgcgaagtgcccagatgaatgaactgccctacctgcagattgctagttttgcttataaccagattactgacactgaaggcatctctcatcctcgtcttgaaaccctgaatctcaaagggaacagcatccacatggtgacaggtctggaccccgagaagttgatcagcctgcacacagtggagcttcgggggaaccagctggaaagcaccctgggaatcaatcttcctaagctgaagaacctctacctggcccaaaacatgctgaagaaggtggaaggcttggaggatctgagcaatctcaccaccttgcatcttcgagacaaccagattgacaccctgagtggcttctccagagaaatgaaatcattgcagtacctcaacctgaggagatcaaagacgctggccttcagacctgatcagactcccaggggcagccaccacatgtatgacagagaacagaggatgcctgtttttgccccaaagctggaaattcatcacaacctgaggcccaggatctgctctgtgccggtcctctgggcagtgtggggtgcagaatggggtgcctaggcctgagcgttgcctggagcctaggccgggggccgccctcgggcaggcgtgggtgagagccaagaccgcgtgggccgcggggtgctggtaggagtggttggagagacttgcgaaggcggctggggtgttcggatttccaataaagaaacagagtgatgctcctgtgtctgaaaaaaa

SEQ ID NO: 522 - DNA, 3032 bp, Homo sapiens; identical to SEQ ID NO: 110

SEQ ID NO: 523 - DNA, 1896 bp, Homo sapiens
cccacgcgtccgcggacgcgtgggcgcgcgggagctgggaggctgcgagatccctaccgcagtagccgcctctgccgccgcggacttcccgaacctcttcagccgcccggagccgctcccggagcccggccgtagaggctgcaatcgcagcgggagcccgcagcccgcgccccgagcccgccgccgcccttcgagggcgcccaggccgcgccatggtgaaggtgacgttcaactccgctctggcccagaaggaggccaagaaggacgagcccaagagcggcgaggaggcgctcatcatcccccccgacgccgtcgcggtggactgcaaggacccagatgatgtggtaccagttggccaaagaagagcctggtgttggtgcatgtgctttggactagcatttatgcttgcaggtgttattctaggaggagcatacttgtacaaatattttgcacttcaaccagatgacgtgtactactgtggaataaagtacatcaaagatgatgtcatcttaaatgagccctctgcagatgccccagctgctctctaccagacaattgaagaaaatattaaaatctttgaagaagaagaagttgaatttatcagtgtgcctgtcccagagtttgcagatagtgatcctgccaacattgttcatgactttaacaagaaacttacagcctatttagatcttaacctggataagtgctatgtgatccctctgaacacttccattgttatgccacccagaaacctactggagttacttattaacatcaaggctggaacctatttgcctcagtcctatctgattcatgagcacatggttattactgatcgcattgaaaacattgatcacctgggtttctttatttatcgactgtgtcatgacaaggaaacttacaaactgcaacgcagagaaactattaaaggtattcagaaacgtgaagccagcaattgtttcgcaattcggcattttgaaaacaaatttgccgtggaaactttaatttgttcttgaacagtcaagaaaaacattattgaggaaaattaatatcacagcataaccccaccctttacattttgtgcagtgattattttttaaagtcttctttcatgtaagtagcaaacagggctttactatcttttcatctcattaattcaattaaaaccattaccttaaaatttttttctttcgaagtgtggtgtcttttatatttgaattagtaactgtatgaagtcatagataatagtacatgtcaccttaggtagtaggaagaattacaatttctttaaatcatttatctggatttttatgttttattagcattttcaagaagacggattatctagagaataatcatatatatgcatacgtaaaaagggaccacagtgacttatttgtagttgttagttgcccctgctaccctagtttgttaggtgcatttgagcacacattttaattttcctctaattaaaatgtgcagtattttcagtgtcaaatatatttaactatttagagaatgatttccacctttatgttttaatatcctaggcatctgctgtaataatattttagaaaatgtttggaatttaagaaataacttgtgttactaatttgtataacccatatctgtgcaatggaatataaatatcacaaagttgtttaactagactgcgtgttgtttttcccgtataataaaaccaaagaatagtttggttcttcaaatcttaagagaatccacataaaagaagaaactattttttaaaaattcacttctatatatacaatgagtaaaatcacagattttttctttaaataaaaataagtcattttaataactaaaccagattctttgtggatactattaaagtaacatttaagcctcaaaaaaaaaaaaaaa

SEQ ID NO: 524 - DNA, 8467 bp, Homo sapiens
ttccccaaattgatggacataaacccatatgcttatctcagcatgtgtttaaaaagcacttgctgagattcagtgaccatccaacattaaaaactgctgatagaaggaaactcacttagctgaattaaggacgtgttcttaaaatctaccgccaacgtaatggggaggagctcacggcgttcgttaatttattcattccgcaaatatgttttgggcagttacataccgaatagtagatggaggtgtgcctgctgtcatggagatagggtgatttcatcctgttgatcaggaaaactcctaggtgcttgcaggtaaatgtgccacaaagaaagtgaggaccaaaggttagttgatgtaaaaacaagtttgaaatgcattttggggtaatttatccggtcgcttcgggcattcctcgcggaaggcgtggtctggtgactcagaagccaacacactgcgggagtccagccgtcggccccctgccgtgtggcgaggcccagtgtgtcccctttgtaaggacagcacaagcaggagttaatggaccggccatccatagcggtggtggggcagggagccagtttccgaaagaaactcacgccgccgcaggagggccctgtgggatgctctgtgcagagctgttgtgcggaccgggagacgggaaagcctggtggctgcaggagggcaccgtgcagaagtatccagtaaaccacccacagcacggcagcagaaaaacgaggaaattatatgtgtgtatgtttataagaactcagaagcaatggtgagcaaaaagcaaaagcaagaggagaaagtcacagtgtgctggcatcaagttgcattgagaggagcccgcggggtagtgcacccgcatttcctcgttgcgttgagaggcgcccgcggggtagtgcacccgcatttcctcgtttgagaggcgcccgcggggtagtgcacccgcatttcctagttgccttgagaggtgccgcggggtagtgcacccgcatttcctagttgccttgagaggtgcccgcggggtagtgcacccgcatttcctagttgccttgagaggtgccgcggggtagtgcacccgcatttcctcgtttcattgagcggtgcccgcggggtagtgcactcgcatttcctagttgccttgagaggtgccgcggggtagtgcacccacatttcttcactcgtttagagttcggggctctcagaacacagggagaatatgggagaattccttactagatgttacagaggccacacagggccacttttttcttttttttttattgtgtcaggtatacgtaaatattcctttcggtcagttcagcacgtaggactgagtggcattaggtacgctcactgtacagccaatgcctccataggccactttttaaatacgcggggctaagggccaacgacaagattgtcatcgaggacaataagtcgatggcgctgcctggtcactggcttggtcagaaaacacatgccagggtgactggatttaacgttcagttttagaaccacaaatctgccagcccaggcattcaagaggaagtgagtaattcactgaattgatggttagcaagacccttcaaagtccttggaagttccgtgtttgctgggggtcacaacagcaattgcgtttctaaaacattgaaaaccacccgtttttcacacatctgaatagcctgagttgtaacagacctaagtaaaggcgtccaaacgtgcctgatcctgtggctgggtcccaggagccttaacaaggcattgagagagctggattgattgattagactcttgccaactgctgtgcggaatacagaaaatgcagctccagctctcaaagggctgaaaatctaattgaggtgaaaaaggtaacatgtgtgaaaaccatgtctgtgtagacttgttttgtatggaccagaaaagttggaagtccagagatggatgcgaggaagtaggggatggagtttccttataacctctggagggacagtccagatacataccggggtgtgtagcgggtggaggttctaagacaggctggaggaacagtgcagacacacaccagggtgtgtagggggtagaggttctaagacagtctggagggagagtgcagacacacaccggggtgtgtaagcagtggaggttctaagacaggctggaggaacagtggagacacacaccagggcgtgtagggggtagaggttctaagacaggctggaggaacagtggagacacacaccacggcgtgtagggggtagaggttctaagacagtctggtgggagagtgcagacacacccggggccgtgtagggggtacaggttctaagacagtctggtgggagagtgcagacacacacggggctgtgtcggggatagaggttctaagacagtctggtgggagagtgcagacacacaccagggcgtgtagggggtggaggttctaagacaggctggaggaacagtggagacacacactggggagcataggggtgcttttctctgagtcccctagtacatggtagaggctgtagaccctccgctcttgggcacgtgggtaggctctcaggatgactcttggctcttgggcatgtgggtgagctctcaggatgatgcccagccccaattttcaggcaattgtgcaaggacttgacccattcatccgctgagctgagttgctgagactgctgggtgcccgggtggtgatcattgtccgtggcatacagaacacactgcagcttctgcaaagtgagctcatttcacgcattttatggctttgccaggctgctgttgacctgccagaacttttaatcagacatttggaggacctgttttgtagtcagtggagaaatattacaaggatagggtaatttgaaatatctaaggattgtaagtgacaagttcatgtctaattttgcatttccagtgaaagcaagtgttggctttgaatgttacttatgtgctgagatgtgtatattcctcagtgcttaattactaaggatttttagggccaagttttgttacagtgaatgattgtggatgcataaagaataaatttaatatttttaaggcatggagattatttgtatctaagaaaccaggtaaaataaagaaacatttatgcttgtgtgactgataaaagagttagagagacactcatattctgggagtttgaagaatgtcattttcattctctaaaagtcttgttagtgtcacagcattgaaaatttaaaaatccgtgtgtattttcttgctagtgctggtacttgaatatctgtatcatccacctatccatccacctacccatatttctataatccaccgtccctcgacatgcctatcatctgtccaccatttctctctgtctaattttcaaaacatcctgtaagtttatataaaggaagatttttcttcttgtgaagttctctaaggctgacaagttacctggcatgactgtggcggatgcccatagccaggtggtcctcggggtacagatggggcaggggcacttgtgagaaacacctgaagtgcttttccccagcctccccggccctgccgggtggtggaggcgctgcacggtgccttccatggagcaagcccggggctccgcagggtcctcagcatgattcagatttccttccacccccagctctagatgatttggtaaaaccacaaacaggcacaaaacagcccacatggaattctaaagttttaatttcattttggaatttatgcactcagatgaaatgatttatgatgatgttgagaatggggatgaaggtggaaacagctccttggaatacggatggagttcgagtgaatttgaaagttacgaagagcagagtgactcggagtgcaagaatgggattcccaggtccttcctgcgcagcaaccacaaaaagcaactttctcatgacctaacccgtttaaaggagcactatgagaaaaagatgagagatttgatggcaagcacggtgggcgtggtggagattcagcagctcaggcagaagcatgaactgaagatgcagaagctcgtgaaggccgcgaaggacggcaccaaggacgggctggagaggaccagggcagccgtgaagaggggccgctccttcatcaggaccaagtctctcatcgcacaggatcacagatcttctcttgaggaagaacagaatttgttcattgatgttgactgcaagcacccggaagccatcttgaccccgatgcccgagggtttatctcagcagcaggttgtaagaagatatatactgggttcagttgtcgacagtgaaaagaactacgtagatgctcttaagaggattttggagcaatatgagaagccgctgtctgagatggagccaaaggttctgagtgagaggaagctgaagacggtgttctaccgagtcaaagagatcctgcagtgccactcgctatttcagatcgcgctggccagccgcgtttccgagtgggactccgtggaaatgataggcgatgtcttcgtggcttcgttttctaagtccatggtgctggatgcatacagtgaatatgtgaacaatttcagcacagccgtggcagtcctcaagaaaacatgtgccacaaagcccgcttttcttgaatttttaaagcaggaacaggaggccagccccgatcgaaccacgctctacagcctgatgatgaagcccatccagaggttcccacagttcatcctcctgctccaggacatgctgaagaacacctccaaaggccaccccgacaggctgcctcttcagatggccctgacagagctcgaaacactagcagagaagttaaatgaaagaaagagagatgctgatcaacgctgtgaagtgaagcaaatagccaaagccataaacgaaagatacctgaacaagcttctcagcagtggaagccgatacctcattcgatcagatgatatgatagaaacagtttacaacgacagaggagagattgttaaaaccaaagaacgccgagtcttcatgttaaatgatgtgttaatgtgtgccaccgtcagctcacgcccctctcatgacagccgtgtgatgagcagccagaggtacttgctgaagtggagcgttccactgggacatgtggacgccatcgagtatggcagcagcgcaggcacgggcgagcacagcaggcaccttgccgttcacccgccggagagcctggccgtggttgctaacgcgaaaccaaacaaagtttacatggggccaggacaactgtatcaagatttacaaaacttgttgcatgacttaaatgtaattggccaaatcactcagctgataggaaaccttaaaggaaactatcagaacttaaaccagtcagtagcccatgactggacatcaggtttacaaaggcttattttgaagaaagaagatgaaatcagagctgcggactgctgcagaattcagttacagcttcccgggaagcaggacaaatctgggcgaccgacgttctttacagctgtgttcaatacgttcacccctgccatcaaggagtcctgggtcaacagcttacagatggccaagctcgccctagaagaggagaaccacatgggctggttctgtgtggaagacgatgggaatcacattaaaaaggagaagcatcctctcctcgtcggacacatgcccgtgatggtggccaagcagcaggagttcaagattgaatgtgctgcttataaccctgaaccttacctaaataatgaaagccagccagattcattttccacggcacatggtttcctgtggatcggaagttgcacccatcaaatgggtcagattgccatcgtctcgtttcaaaattccactcccaaagtcattgagtgcttcaacgtggaatctcgcatcctgtgcatgctgtacgttcccgtcgaggagaagcgcagagagcctggggcacccccggaccccgagaccccggccgtgagagcttctgatgtccccacgatctgtgtagggacggaggagggaagcatttccatttataaaagcagtcaaggctccaagaaagtgagacttcagcactttttcactcctgagaagtccacagtcatgagcctggcttgcacgtctcagagcctgtacgctggcctggtcaacggggcagtcgccagctacgccagagccccagatggatcctgggattcagaacctcaaaaagtgatcaagttaggcgtcctaccagttagaagtctactcatgatggaagacacgttgtgggcggcttccggaggtcaagtcttcatcatcagtgtggagactcatgctgtagagggtcagctggaggcccaccaggaggaaggcatggtgatctcccacatggccgtgtccggcgtcgggatctggattgccttcacctcagggtccacgctccgcctttttcacacggaaactctcaagcacctgcaggacatcaacatcgccacccctgttcacaacatgctgccagggcaccagcggctgtcggtgacgagcctgctcgtctgccacggattgctgatggtcggcaccagcctgggagtcctcgtggccctgccggtcccacgtctgcaagggattcccaaagtgaccggaagaggcatggtctcctaccatgcacacaacagtcctgtcaaattcatcgtcctggccacggctctgcacgagaaagacaaggacaaatccagggacagcctggctcctggccccgagcctcaggacgaagaccagaaggacgcacttccgagtggaggagctggttcatctctgagccagggtgaccctgacgcagccatctggttgggagattcgctgggatcgatgactcagaaaagcgacctgtcctcctcatctgggtccctgagcttgtctcacggctccagctctctagagcacagatcagaggacagcaccatctatgatctcctgaaggatcctgtctcgctgagaagcaaagcacgccgggccaagaaagccaaggccagctcggcgctggtggtctgtggagggcagggccaccgccgggtgcacaggaaggcccggcagccccaccaggaagagctggcgccgaccgtcatggtctggcagatccctctgctgaatatataagcaggacggccgccttctgctgtcagaatttgcaatcaagggtgacttctcagctaatcctacagcctgagtggttaagctgtgtctacactggttgggaataaattaaaaacagtatttgggggagaaacgtgcaatagcgtaatggtggtgtccctgccaattccttccttctcttctgtacagcagaagtaattacaagcacttctcacgaaggcagaagactgatgcaattttcgagtaattgagtgcagttctgggaaaataccacattctttttgactgctgtagtccatatatgaatactaaatgttaaacttcatcagcgtcagacctattgtatcatattagagaatttgcagactaagaatttatgagaaaatatatgtattcagtagtgcaggcatttattaacaattcttaaaagttttacctgattcagattcacgacttttatttatattctatatttttgaatttcagagtaaaatttgttaacaattttaaaagccaggtaacacctaccagtccagttagcatgatttgctttcagaagtgagctgggttttccaaagtggtataatgtgtgtactgtatattttaacaaagtaatatttttgtattgcatttttctattaaaaaattaacagttaatgtttcagtcaatgtattatctgtagcatttcacaaataatgtttgctttgaaccaaaatgctcagtgcctatcaacatttggactcaagcatcaacaccaaattattcctcccttctcgtataaatagagtgactatccacaggagaaaagtgtgtgctttagtattagaggagataggcagagaagtcttgcttagttccttcgtgcagcttcttgcccctgttgacgtggaatgctgtgtctgctttagcacgcacgctccgaatgactcctggtgctaggccatgctggctgctgtcactgagcgggactcaggccaagaggcgtgacctcgggccagcctgtctgttgtgcagacgcctcctctgcagaacgcatcagtttctattctgcagttgcagagccagccccgcgtgagaacgtgcataatgagtgcacaccatcatgtcaaggtgcatacttagtgagcgccatcctgctgaacgtgtatttcagtgtttcacttactggacggataacaagaaaaaaatcctaacacaggcagtcaccagaaataaatgtctcagcactttacagatgactaaaaatgttaattttatgacttagccaaatatgttctaggttgcatatatcccccatgtgaaagtgatttcttcccaagcttctcaaactgttagctgctgtctgacttcatcaataaagtatttttatttt

SEQ ID NO: 525 - DNA, 3901 bp, Homo sapiens
gttttcctccgcggatccgcggctggacttggacccagggctctcccgacagcgccctggaacccaaattcaagcaccatccaattcggacgctcatcgcatctcgcctgagcacaaccacggattgcgaactcagcgcagcgcgtggccgctggccgcccgcggcgatctcgatcccgctgacccgaatcctggagtcagaggtttcctatccccctcaagcccccacaggagtcaccaacccagggccggcttatgggtgagggggcaccccctggggcctgagctgccccgcacaggatgccccgtgccccccacttcatgcccttgctgctactgctgctgctgctctcacttccccatactcaggccgcctttccccaggaccccctccctctgttgatctctgaccttcaaggtacttccccattatcctggtttcggggcctggaggatgatgctgtggctgcagaacttgggctggactttcagagattcctgaccttgaaccggaccttgctagtggctgcccgggatcacgttttctccttcgatcttcaagccgaagaagaaggggaggggctggtgcccaacaagtatctaacatggagaagccaagatgtggagaactgtgctgtacggggaaagctgacggatgagtgctacaactatattcgtgttcttgttccctgggactcccagacgctccttgcctgtggaacgaactcattcagccctgtgtgccgcagctatgggataacttcgctgcagcaggagggtgaggaactgagtgggcaggctcgatgcccctttgatgccacccagtccaacgtggccatctttgcagagggcagcctgtactcagccacagctgcggatttccaggccagtgatgctgtagtttacagaagccttgggccccagcccccactccgctccgccaagtatgactccaagtggctccgagagccacactttgtccaggccttggagcatggagaccatgtctacttcttcttccgcgaggtctctgtggaggatgctcggctggggagggtgcagttctcccgcgtagcccgagtatgtaaacgtgacatgggcggctcgcctcgggccttggaccgccactggacatccttcctgaagcttcggctcaactgctctgtccctggggactctactttctattttgatgttttacaggccttgactgggcctgtgaacctgcatggccgctctgctctctttggggtcttcaccacccagaccaatagcatccctggctctgccgtctgcgccttctacctggatgagattgagcgtgggtttgagggcaagttcaaggagcagaggagtctggatggggcctggactcctgtgtctgaggacagagttccctcacccaggccaggatcctgtgcaggagtagggggagctgccttgttctcctcttcccgagacctccctgatgatgtcctgaccttcatcaaggctcacccgctgctggaccccgctgtaccacctgtcacccatcagcctctactcactctcactagcagggccctactgacccaagtagctgtggatggcatggctggtccccacagtaacatcacagtcatgttccttggctccaatgatgggacagtgctgaaggtgctgaccccaggtgggcgatccgggggacctgagcccatcctcctggaagagattgatgcctacagccctgcccggtgcagtgggaagcggacagcccaaacagcacgacggatcatagggctggagctggacactgagggtcacaggctttttgtggctttttctggctgtattgtctacctccctctcagccggtgtgcccggcatggggcctgtcagaggagctgtttggcttctcaggacccatactgtggatggcatagctccaggggctgtgtggatatcaggggatctggtgggactgatgtggatcaggctgggaaccaggaatccatggagcatggtgactgccaagatggagctactgggagtcagtctggccctggggattctgcttatggcgtgcgccgggacctgcccccagcctcggcctcccgctccgtccccatcccactcctcctggccagtgtggccgcagcttttgccctgggcgcctcagtctctggcctcctggtctcctgtgcttgtcgccgcgcccaccgacgtcggggcaaggacatcgagactccggggctcccgcgccctctctccctccgcagtttggcccggctccacggtgggggcccagagcccccgccgccctccaaggacggggacgcggtgcagacgccgcagctctacaccaccttcctgccgcctccggagggcgtgcccccgccggagctggcctgcctgcccacccccgagtccacgccggagctgccggtcaagcacctccgcgccgccggggacccctgggagtggaaccagaacaggaacaacgccaaggagggtccgggccgctcacggggcgggcacgcggcgggcgggcccgcgccccgcgtgctggtgaggccaccgccgcccggctgtcccgggcaggccgtggaagtcaccaccctggaggaactgctgcgctacctgcacggcccgcagccgcccagaaagggggccgagccccccgcccctttaacctcgcgggcgctcccgccggagcccgcccccgccctcttgggcggccccagccccaggccccacgagtgcgcctcgccgctgaggctggacgtgccccccgagggcaggtgcgcctctgcccccgcccggcccgcgctctccgcccccgctccccggctgggcgtcggcggaggccggaggttgcctttctccggccaccgggccccccctgccctgctcactcgagtcccctcgggaggtccctccaggtactccgggggtcccgggaagcacctcctgtacctgggccggcccgagggctaccggggccgcgccctgaaaagggtggacgtcgagaagccccagttgtccctgaagcctcccctcgtcgggccctcctcccgccaggccgtcccgaacggcggccgtttcaacttttaaagggagcggtccacggcctccagcgtggggagcgcccgagtcctctcggccacgagctggacgctcttcaggacgtttcaccgccccctcgccccgcacctccagccttcccgactcgcagagtctcccgaggccccttttcgcctcgggtttatttattgactgtctttccccctgtcctcgacagaagagtgggaggtgagaagcccgtctcctcagtgagccagcatttcagggggagctggcggactcccactccccgctcccttccagccaagctgccttaactcgcccctcggggctcccccagagactgtgccccgggcgggccgcgcgcgctgtgtccagagtcctcgggcctcctgggtctgggacgtgcctctcctactgtgtaggagcctccgcttcccaatacagccgtgtctgcagccactgcctgacttcactcgggcgggggagggcggcagtcggtcggctcgctctgggcgccctcgctctctgccttcatctgggccctgggctctcccgggtaatgggatggctgcggtcccgccggggggcagtctggaaaggtttcctaaaggagacgagcgaattaacggtgtcgaggtgagccagggccagggggaccccggtaaagtttagttgaggctggggaaggccctcggagctcgtttccagatcgaggtaagagggactttcttaaaggcctagtctatgggatggggcggcggagggaattttttgagaaataaaatgaagctgcagtgtacgttacttgaagttccacatcagaaaaaaaaaaaaa

SEQ ID NO: 526 - DNA, 1647 bp, Homo sapiens
agcgcggggcggggcgggccggtgcgcctggcagtcggctgcgtcctcctgcgagcgccggagaggggctggaggcggggcgagggcgcggctcgaggcatccctgcagggcgctcctccgagtccctcggcgctctgagcccacagggaagaaggaggggccggcgtcagtgacgtcagcgagaccgaggtgagcgtgggcgttgccagtggtgctctgtcagtgcctatggattatggcagggaaagtaaaatgggtcactgatatcgagaagtcagtgctgatcaataactttgaaaagagaggatgggtccaagtgacagaaaacgaggactggaatttttactggatgagtgtgcaaaccatccgaaatgtgttcagcgttgaagctggatatcggctctcagatgaccaaatagtcaaccattttccaaaccactatgaactgacccggaaggacctgatggtgaagaacatcaaaagatacaggaaggagctggagaaagaagggagtcctctggcagaaaaagatgaaaatggaaaatacctctatctggactttgttccagtcacctatatgctgcccgctgactacaacctgtttgtagaggagttccggaagagcccgtccagcacctggatcatgaagccttgtggcaaggcccagggaaagggcatcttccttatcaacaagctctcacagatcaaaaagtggtcccgggacagcaagacatcttcgtttgtgtctcaatctaataaggaagcctacgtgatctctctctatattaacaacccgttactaattggcgggaggaagttcgacctgcgcttgtacgttctggtgtccacgtaccgtccactgcgctgttacatgtacaagcttgggttttgccggttctgcacagtgaaatacaccccgagtaccagtgagctggacaacatgttcgttcatctcaccaacgtcgccatccagaaacacggggaggactacaaccacatccatgggggcaagtggacagtgagtaacctgcggctctacctggagagcacccgcggcaaggaggtgaccagcaagctgttcgacgagatccactggatcatcgtgcagtccctgaaggctgtggcgccggtgatgaacaatgacaagcactgctttgaatgctatggctacgacatcatcatcgacgacaagctgaagccctggctgatcgaggtgaatgcgtccccgtctctcacgtccagcactgccaatgaccgaatcctcaagtacaacctgattaatgacaccctcaacatcgccgtcccgaatggtgaaatcccagactgcaaatggaacaagtcgccacctaaggaagtcctcggcaattacgagattctgtatgatgaagaattggcccagggtgacggggctgaccgggagctgagaagccgtcagggtcagtctctggggcccagagcaggccgatcgagagactcggggagagcggtcctcaccacctggaagtgagtcccacctggaccttatcaaaactactcactccacctgggcccctgctgaagccctattttgaaatttcccttttgtagagcttttttcctttcctaagccctgtaaataaacgaaggcacttctttggaaggttaaa

SEQ ID NO: 527 - DNA, 3003 bp, Homo sapiens
ctagttctagatccggcgagtagctggcggtcccgggtgctgctggttagtgtgctctgagggagggtccgagccagccgctgttttgccggaggagcccctcaggccgtagtaagcattaataatgtctttcatctttgagtggatctacaatggcttcagcagtgtgctccagttcctaggactgtacaagaaatctggaaaacttgtattcttaggtttggataatgcaggcaaaaccactcttcttcacatgctcaaagatgacagattgggccaacatgttccaacactacatccgacatcagaagagctaacaattgctggaatgacctttacaacttttgatcttggtgggcacgagcaagcacgtcgcgtttggaaaaattatctcccagcaattaatgggattgtctttctggtggactgtgcagatcattctcgcctcgtggaatccaaagttgagcttaatgctttaatgactgatgaaacaatatccaatgtgccaatccttatcttgggtaacaaaattgacagaacagatgcaatcagtgaagaaaaactccgtgagatatttgggctttatggacagaccacaggaaaggggaatgtgaccctgaaggagctgaatgctcgccccatggaagtgttcatgtgcagtgtgctcaagaggcaaggttacggcgagggtttccgctggctctcccagtatattgactgatgtttggacggtgaaaataaaagagttttacttctctggactgatcctattcacagcttcctcatgaacttttctaatagaacaaggaaagctctccaaccatgtctggcgttgagaagccaagagtctctgtcaactctctcattgcccagtggtgacatgtgctcttctccacactgttgggaggtaatgctgccccacgtgctggtgcaggtcagtatcctgggacttggaagctggcaggatttgccgggtaaagctgtatgccatcatggggcacctgaaaagaaaaacacgtctcaccactgtggttgattcaaaagaaagtgattctattttttaaagaaagcgttgttaatgtaattggtatccctcctaactttttgagttcacaatttacttggtccagagttttctattcttttttttttttaaactaatgaatgacatttagatacttcataaaattatgaacagatatggaggccagagctcatttgggtaaacttactcctgctgagttagcaggttggtgagagaagctcccctgagctcacctgtctctctgactgccttggagtaggtggcataaccttgtgcacagagaactagaaaaggggcagaaccccggccttgcagttgtggcaggtttccactgtggtaagctaggttcattcctcatcaaggaatgtgtagcagattgttcactgtggaggagttaattatagaatgggttattgttgttattcttactcatgaagttacagattttagccagtctttgcttttatacttttgtgaaatttaatttctctctatagcaccttcctttttcgttttcagttatcaaaagtgactttgacctcataaaagagttgagaacatctctcgtgtcacatactgcaggtgcatcagttacttttgcacagattctgggggacatttttctgaataggaagacaggacaaagttaacagcttaagggctcttaattctgtgagttgaggacttaaaagtattgtagcatttgtttggatccatgaaaaatgtattcagtgggctttaaaatttccatttgcagaatttggtctctcaggctgtttgggagctcttttttttacattttttctcctttgacacctattttattggtgtttaaagtaaaggttaacatctgtagcttttccaggtttttttttttttttttttgatatgaaattgtctttctccattgcagaaataagctagggaaacactaacccaaaaactttctgtagagctgttcctttggaggcagcatcacttattggcagtaaagactcagtataaaagcaccagcatccctacttgggtgatggggattaattttatagcattccattttcctagtgccacatgtgaaattggattttgatgatcttaatctatattctacccttataataaaagatcaaaagatatatctcctatgaacagattggagataggagatgaaaagttgggaggatgtctttattctaatgtgagggtagggaaaatgtggataacattactggggtgaaggaggcattgttctttagttggagttctcatttttattctccagtactgacttgtggggaaagcatactttttcactgccaggtactgaatgcagaggctcagtgaagtatatatgtgggaagtgcatgcatttcgtttattagcaaacatagctggattaagacaaagttgttggtttggaaaggggttaaagccttaagtgaacaaatctagctaacagtgaatgaactaggtaatataacttgcatatttttaatttcctttggttaaaggtcccccatacttctctgttcggagacatgagaagtatgattacttcagtgttagttttcttaattttttttttcccctatttgtcccttgtcactttgttgcaagctagaaatctgtgggttatacatagggcagctctttgtgaaagtggtttattccactggagaaaggggattgaaaatcagttagaaccaatgtatttcttgccccacggaacactattcctataagatagctgaaagaagctgctgtgaggagctcagctccaaacacaggatcagcaccttgtataggaattcccatgaattatgacttctcattctgttttatcagagtgcatatatgtcctacttcaggaaaagtaaaacagtcatttacgaaagaaagtcaatctgtatcctaagcattttaataaaaagttaaaacaaaaaaaaaaaaaaaaaaaa

SEQ ID NO: 528 - DNA, 3124 bp, Homo sapiens
ggagattaggtccaagcgcccgcccagaggcaggcagtccgcgagcccagccgccgctgtcgccgccagtagcagccttcgccagcagcgccgcggcggaaccgggcgcaggggagcgagcccggccccgccagcccagcccagcccagcccagccctactccctccccacgccagggcagcagccgttgctcagagagaaggtggaggaagaaatccagaccctagcacgcgcgcaccatcatggaccattatgattctcagcaaaccaacgattacatgcagccagaagaggactgggaccgggacctgctcctggacccggcctgggagaagcagcagagaaagacattcacggcatggtgtaactcccacctccggaaggcggggacacagatcgagaacatcgaagaggacttccgggatggcctgaagctcatgctgctgctggaggtcatctcaggtgaacgcttggccaagccagagcgaggcaagatgagagtgcacaagatctccaacgtcaacaaggccctggatttcatagccagcaaaggcgtcaaactggtgtccatcggagccgaagaaatcgtggatgggaatgtgaagatgaccctgggcatgatctggaccatcatcctgcgctttgccatccaggacatctccgtggaagagacttcagccaaggaagggctgctcctgtggtgtcagagaaagacagccccttacaaaaatgtcaacatccagaacttccacataagctggaaggatggcctcggcttctgtgctttgatccaccgacaccggcccgagctgattgactacgggaagctgcggaaggatgatccactcacaaatctgaatacggcttttgacgtggcagagaagtacctggacatccccaagatgctggatgccgaagacatcgttggaactgcccgaccggatgagaaagccatcatgacttacgtgtctagcttctaccacgccttctctggagcccagaaggcggagacagcagccaatcgcatctgcaaggtgttggccgtcaaccaggagaacgagcagcttatggaagactacgagaagctggccagtgatctgttggagtggatccgccgcacaatcccgtggctggagaaccgggtgcccgagaacaccatgcatgccatgcaacagaagctggaggacttccgggactaccggcgcctgcacaagccgcccaaggtgcaggagaagtgccagctggagatcaacttcaacacgctgcagaccaagctgcggctcagcaaccggcctgccttcatgccctctgagggcaggatggtctcggacatcaacaatgcctggggctgcctggagcaggtggagaagggctatgaggagtggttgctgaatgagatccggaggctggagcgactggaccacctggcagagaagttccggcagaaggcctccatccacgaggcctggactgacggcaaagaggccatgctgcgacagaaggactatgagaccgccaccctctcggagatcaaggccctgctcaagaagcatgaggccttcgagagtgacctggctgcccaccaggaccgtgtggagcagattgccgccatcgcacaggagctcaatgagctggactattatgactcacccagtgtcaacgcccgttgccaaaagatctgtgaccagtgggacaatctgggggccctaactcagaagcgaagggaagctctggagcggaccgagaaactgctggagaccattgaccagctgtacttggagtatgccaagcgggctgcacccttcaacaactggatggagggggccatggaggacctgcaggacaccttcattgtgcacaccattgaggagatccagggactgaccacagcccatgagcagttcaaggccaccctccctgatgccgacaaggagcgcctggccatcctgggcatccacaatgaggtgtccaagattgtccagacctaccacgtcaatatggcgggcaccaacccctacacaaccatcacgcctcaggagatcaatggcaaatgggaccacgtgcggcagctggtgcctcggagggaccaagctctgacggaggagcatgcccgacagcagcacaatgagaggctacgcaagcagtttggagcccaggccaatgtcatcgggccctggatccagaccaagatggaggagatcgggaggatctccattgagatgcatgggaccctggaggaccagctcagccacctgcggcagtatgagaagagcatcgtcaactacaagccaaagattgatcagctggagggcgaccaccagctcatccaggaggcgctcatcttcgacaacaagcacaccaactacaccatggagcacatccgtgtgggctgggagcagctgctcaccaccatcgccaggaccatcaatgaggtagagaaccagatcctgacccgggatgccaagggcatcagccaggagcagatgaatgagttccgggcctccttcaaccactttgaccgggatcactccggcacactgggtcccgaggagttcaaagcctgcctcatcagcttgggttatgatattggcaacgacccccagggagaagcagaatttgcccgcatcatgagcattgtggaccccaaccgcctgggggtagtgacattccaggccttcattgacttcatgtcccgcgagacagccgacacagatacagcagaccaagtcatggcttccttcaagatcctggctggggacaagaactacattaccatggacgagctgcgccgcgagctgccacccgaccaggctgagtactgcatcgcgcggatggccccctacaccggccccgactccgtgccaggtgctctggactacatgtccttctccacggcgctgtacggcgagagtgacctctaatccaccccgcccggccgccctcgtcttgtgcgccgtgccctgccttgcacctccgccgtcgcccatctcctgcctgggttcggtttcagctcccagcctccacccgggtgagctggggcccacgtggcatcgatcctccctgcccgcgaagtgacagtttacaaaattattttctgcaaaaaaaaaaaaaaaaaaaaaaaaaa

SEQ ID NO: 529 - DNA, 1400 bp, Homo sapiens
gaagacagaatcaacatgagcacagcaggaaaagtaatcaaatgcaaagcagctgtgctatgggagttaaagaaacccttttccattgaggaggtggaggttgcacctcctaaggcccatgaagttcgtattaagatggtggctgtaggaatctgtggcacagatgaccacgtggttagtggtaccatggtgaccccacttcctgtgattttaggccatgaggcagccggcatcgtggagagtgttggagaaggggtgactacagtcaaaccaggtgataaagtcatcccactcgctattcctcagtgtggaaaatgcagaatttgtaaaaacccggagagcaactactgcttgaaaaacgatgtaagcaatcctcaggggaccctgcaggatggcaccagcaggttcacctgcaggaggaagcccatccaccacttccttggcatcagcaccttctcacagtacacagtggtggatgaaaatgcagtagccaaaattgatgcagcctcgcctctagagaaagtctgtctcattggctgtggattttcaactggttatgggtctgcagtcaatgttgccaaggtcaccccaggctctacctgtgctgtgtttggcctgggaggggtcggcctatctgctattatgggctgtaaagcagctggggcagccagaatcattgcggtggacatcaacaaggacaaatttgcaaaggccaaagagttgggggccactgaatgcatcaaccctcaagactacaagaaacccatccaggaggtgctaaaggaaatgactgatggaggtgtggatttttcatttgaagtcatcggtcggcttgacaccatgatggcttccctgttatgttgtcatgaggcatgtggcacaagtgtcatcgtaggggtacctcctgattcccaaaacctctcaatgaaccctatgctgctactgactggacgtacctggaagggagctattcttggtggctttaaaagtaaagaatgtgtcccaaaacttgtggctgattttatggctaagaagttttcattggatgcattaataacccatgttttaccttttgaaaaaataaatgaaggatttgacctgcttcactctgggaaaagtatccgtaccattctgatgttttgagacaatacagatgttttcccttgtggcagtcttcagcctcctctaccctacatgatctggagcaacagctgggaaatatcattaattctgctcatcacagattttatcaataaattacatttgggggctttccaaagaaatggaaattgatgtaaaattatttttcaagcaaatgtttaaaatccaaatgagaactaaataaagtgttgaacatcagctggggaattgaagccaataaaccttccttcttaaccatt

SEQ ID NO: 530 - DNA, 6795 bp, Homo sapiens
gggacagcacaacctcatccaagctctcctacctctgcccagccgtccctctcatcctccccattcctcgtccacactccatccaaagaagagggaaagcaccgaatagaggggggcgaaggcaaagtctgctgttcttccccctgggcccccttgctcctccatcctcattctctcaccaccagcccccctaaccccaaggagcccaggaactgaggcgactcgccccactgccatgtccaaaagcttgaaaaagaaaagccactggactagcaaagtccatgagagtgtcattggcaggaacccggagggccagctgggctttgaactgaaggggggcgccgagaatggacagttcccctacctgggggaggtgaagcccggcaaggtggcctatgagagcggcagcaaattggtgtcggaggagctgctgctggaggtgaacgagacccccgtggcggggctcaccatcagggacgtgctggccgtgatcaaacactgcaaggaccccctccggctcaagtgtgtcaagcaaggaggaattgttgataaagaccttcgtcactacctcaacttacgatttcaaaagggttctgtggaccatgagcttcagcaaatcattcgtgacaacctctacctccgcacggtgccatgcaccacaaggccacataaggagggtgaggtccctggagtggattatattttcatcactgttgaagattttatggaattggagaaaagtggtgctctcctagaaagtgggacttatgaagacaattactacggtaccccaaagccgccagcagaaccagcaccattattgttaaatgtaacagaccagatacttccaggagccactccaagtgctgaaggaaaacggaagaggaataaatcagtgagcaacatggagaaagccagtatagagcctcctgaggaggaagaggaagagaggcctgtggtcaatggaaatggagtagtagtaacaccagaatccagtgaacatgaagacaaaagtgcaggtgcctcaggggagatgccctcccagccttatcctgcaccagtgtacagtcagcctgaggagctgaaggagcagatggatgacacaaagccaactaaacctgaagacaatgaggaaccagacccattgcctgataactgggaaatggcctatacagagaagggcgaagtctacttcattgaccataacacaaagacaacatcatggctggatccacgacttgcgaaaaaagctaaacctccagaagagtgcaaagaaaatgagcttccatatggctgggaaaaaatcgatgatcccatttatggcacttattatgttgaccacataaatagaagaacacagtttgaaaatcctgtcctggaagcaaaaaggaagctacagcaacataacatgccccacacagaacttggaacaaagcccctgcaggccccaggtttccgagaaaaaccactcttcacccgggatgcatcccagttgaagggaacattcctcagcaccaccctaaaaaagagcaacatgggctttggatttaccatcattggtggagacgagcctgatgagtttctgcaggtgaaaagtgtgattccggatgggcctgcagcacaggatggaaaaatggaaacaggtgatgtcattgtctatattaatgaagtttgtgtccttggacacactcatgcagatgttgtcaaacttttccagtctgttcctattggtcagagtgtcaacctggtgttgtgtcgtggctaccctttgccctttgatcctgaagaccctgctaacagcatggtgccaccccttgcaataatggagaggccacctccagtgatggtcaatggaagacacaactatgaaacatatttggagtacatttctcggacctcacagtcagttccagatataacagatcggccgcctcattctctgcactccatgccaactgatggtcagctagacggcacgtatccaccgcccgtccatgatgacaatgtgtctatggcttcatctggggccacccaagctgaacttatgaccttaaccattgtgaaaggtgcccagggcttcggcttcactattgccgacagtcctacaggacagcgggtgaaacaaatacttgacattcagggatgccctggcctgtgtgaaggcgacctcattgttgagatcaaccagcagaatgtacagaacctgagccatacagaagtagtggatatacttaaggactgtcccattggaagtgaaacttctttgattatccatcgaggaggtttcttttctccatggaaaactccaaagcctataatggaccgatgggagaatcaaggcagtcctcaaacgagtttatctgctccggccataccgcagaacctgcccttcccacctgcccttcacaggagctcctttcctgactcaacagaggcctttgacccacggaagcctgatccatatgagctctacgagaaatctagggccatttatgaaagtaggcgtccagattataaggaattggatgttcatcttcggaggatggagtctggatttggcttcagaatcctcgggggagatgagcctggacagcctattttgattggagctgtcattgccatgggctcagccgacagagatggccgccttcacccaggagatgagcttgtgtatgttgatgggattccagtagccggcaaaacccaccgctatgtcatcgacctcatgcaccacgcagcccgcaatgggcaggtcaacctcactgtgagaagaaaggtgctatgtggaggggagccctgcccagagaacgggagaagtccaggctctgtatccacccaccacagctctccacgcagtgactacgcaacctacaccaacagcaaccacgctgcccccagtagcaatgcctctccccctgaaggcttcgcctcccacagcctgcagaccagtgatgtggtcattcaccgcaaagagaatgagggcttcggctttgtcatcatcagctccctgaacaggcctgagtctggatccactataactgtgccccataaaatcggacgcatcattgatgggagtcctgcagatcgctgtgcaaaactaaaagtgggagaccggatcctagcagtgaatggccagtctatcatcaacatgcctcacgctgacatcgtgaagctcatcaaggatgcaggtcttagtgtcacccttcgcatcattcctcaggaggagctcaacagccccacctcggcacccagctcagagaagcagagtcccatggcgcagcagagtcccctggcacagcagagtcccctggcccagccaagcccagccacccccaacagccccatcgcccagccagcaccacctcaaccacttcagctgcaaggacacgaaaatagttacaggtcagaagtgaaagcaaggcaagatgtgaaaccagacatccgacagcctccattcacagactacaggcagcccccgctggattacaggcaacccccaggaggggactaccagcagcccccacccttggactacaggcagcctcccctgctggactacaggcagcactcccccgacaccaggcagtaccctctgtcggactacagacaaccccaggattttgattatttcactgtggacatggagaaaggagccaaaggatttggattcagcattcgtggaggaagggaatacaaaatggatttgtatgtgttgagactggcagaagatggaccagcaataaggaatgggaggatgagggtaggagatcaaatcattgaaatcaatggggaaagcacaagggacatgacacatgccagagcaatagaactcatcaaatctggaggaagacgagtgaggctgctgctcaagagaggcacgggacaggtcccagaatatgacgaacccgccccctggagttctcccgctgccgccgccccaggtctgccggaagtaggcgtctccctggacgacggcctcgctccattctctccatcacatccagccccaccctccgacccttcccaccagataagcccaggcccaacttgggatatcaaacgggaacacgacgttaggaaaccaaaggagctttcagcctgcggccagaagaagcagcgcctcggggagcagagggagcgctcggcgagtccgcagagggccgcgcggccgaggctcgaggaggcgcccggcggccaggggcggcccgaggccggcaggcccgcctcggaggccagggcgcccgggctcgcggcggcagacgcggcggacgcggcgcgggcgggcgggaaggaggcgccccgtgcggcggcgggctccgagctctgccggcgcgaaggcccgggggctgcgccggcgtttgccggcccgggcggcggcggcagcggcgcgctggaggccgagggcagggcgggtgcgcgcgcgggtccccggccgggcccgcgacccccggggggcgccccggcgcgcaaggccgccgtcgcgccggggccctggaaggtgccgggttctgacaagctgcccagcgtcctcaaacccggcgcctcggccgccagcagatgagccgcgcggccacggccaacccgcccgccccggcgcaggcagttcttcttaggttccgtctcacggcgttttaatttattttcactgtcacacgcatagatccacgaggcaccaaggcctgggagcatcgacgtgaagtcccacgtgtccggtgtgcttgggcggcatcgcatcaacgcgcagacctaaactgatcctaaagcccccggttcccttgtgggggctttggcagctatggaagaaccaaaataacgtgaagaacatcacagagagacagtgcagtgtagctttagtttaagaaaaaaaaatattcctccccactgcatgaaggacttggatgtcatccaaactttatatcaagaaacaggacaaagttaagagcaatcacaaactggaatatcgccttaaaaatcaaactgcacggagcaagctgaaactgagacaagattatatcttttaattgatctaaagcgttgtaaataaattgttctcgacatatctagacaggggttaaagggtttctttgacacattcggaaccgttcacccatgacatgtttccatggctcacccttggcatccatcctcggtgttagcagcagcgttccctgcctcctgcaggatgacttagaaatctagtgagtttcttggtgtgatgccatttttattgccctttctgtgatcaaatcatatttctgtacattttcagtggtagaaaaaaaaggttttaaaaattgtatcctagggaacagtttgccataagtcagaattttgcagtttagctcatagatcttaattggtttttctctaaaatatgaattttataattgaaggaccacaatttgtttaatcaagataggcaacgctgcagttcctttatgaagaggcttttctgtcgtcccaggctagcagagatggatagcttctttgtcagcaatgtgatttcacttattttattgtcttattttaaaccctgtctccatgacttcatttgcactttgacagagcagaggcagagtatttgtcttatatttctcagattataatattaaaaaattacaatcaatttattttcattaaagaacgtgagtctttttagcattcctttctgcttatccttctttccttaccctttgtccttttgtttccattagttttctttcgtcttgtattccttgccactttattttgttagcaacttctagatgtttatcttcatggatctatgattgacctcctagtaaaattctaagtcttgcctttcttccctgctgttttagcatttctttgtaaaatgttagcttcaattagttagccattggtacttactgtagctacacatattaaaaggcaaagtgtttctgaaggcaatttctttttaatatgcccgaatgaatgaggcttcatcctttccatattcttactctttacagtagttcaaatgcaaataagctccacctccctgcacttgtagtctaaaaagtaaaaggggcgatcaggtccatctcaaaggtcacacgtaatagcctccctgggctgatcattccctctccttgtaattgcagtatcctgagtagcagtttaattttcatcaaacatcggagtagtttagttgtttgacaggaggagaataaggctgaaagcctcaagtgaaggatcttgcagcttgtaaaagcaatttccaaaaatgaaacccattcatcgtaaacaaaagcacaaacacttgtagcagtttataatgcttttggtttaatctcaattagtctttctcccctggactagaaatccagtatagtttgccattaatttattgaatctggttttggacaatgcttctgtagtgtagctgcacgtcctggtactgtatcctctgactttattttccatgtattacaaaaggaaaaaaaaattgagattacactggcataaactctagtttgcacagttcacagctactacttgtgcagtaattgctttatgcggctgtaatccataacctgtgaagacagcacatcatctaaatcccattccaaataatatttgtgtagtgttagctgtgaatttaccctgtacagctgtatctctataaatataattccatgtattaatagtcacagaaagactgtaagtgagcaactatttttatgaaacgtaccactatggataaattaacttttacagaaatcttgtttactgtatgatattctaaaacactgtcaaataaaatatatatcc

SEQ ID NO: 531 - DNA, 1686 bp, Homo sapiens
ctggaacaatccgcagcggcggcggcagcggcgggagaagaggtttaatttagttgattttctgtggttgttggttgttcgctagtctcacggtgatggaagctgcacattttttcgaagggaccgagaagctgctggaggtttggttctcccggcagcagcccgacgcaaaccaaggatctggggatcttcgcactatcccaagatctgagtgggacatacttttgaaggatgtgcaatgttcaatcataagtgtgacaaaaactgacaagcaggaagcttatgtactcagtgagagtagcatgtttgtctccaagagacgtttcattttgaagacatgtggtaccaccctcttgctgaaagcactggttcccctgttgaagcttgctagggattacagtgggtttgactcaattcaaagcttcttttattctcgtaagaatttcatgaagccttctcaccaagggtacccacaccggaatttccaggaagaaatagagtttcttaatgcaattttcccaaatggagcagcatattgtatgggacgtatgaattctgactgttggtacttatatactctggatttcccagagagtcgggtaatcagtcagccagatcaaaccttggaaattctgatgagtgagcttgacccagcagttatggaccagttctacatgaaagatggtgttactgcaaaggatgtcactcgtgagagtggaattcgtgacctgataccaggttctgtcattgatgccacaatgttcaatccttgtgggtattcgatgaatggaatgaaatcggatggaacttattggactattcacatcactccagaaccagaattttcttatgttagctttgaaacaaacttaagtcagacctcctatgatgacctgatcaggaaagttgtagaagtcttcaagccaggaaaatttgtgaccaccttgtttgttaatcagagttctaaatgtcgcacagtgcttgcttcgccccagaagattgaaggttttaagcgtcttgattgccagagtgctatgttcaatgattacaattttgtttttaccagttttgctaagaagcagcaacaacagcagagttgattaagaaaaatgaagaaaaaacgcaaaaagagaacacatgtagaaggtggtggatgctttctagatgtcgatgctgggggcagtgctttccataaccaccactgtgtagttgcagaaagccctagatgtaatgatagtgtaatcattttgaattgtatgcattattatatcaaggagttagatatcttgcatgaatgctctcttctgtgtttaggtattctctgccactcttgctgtgaaattgaagtgcatgtagaaaaaaccttttactatatgaaactttacaacacttgtgaaagcaactcaatttggtttatgcacagtgtaatatttctccaagtatcatccaaaattccccacagacaaggctttcgtcctcattaggtgttggcctcagcctaaccctctaggactgttctattaaattgctgccagaattttacatccagttacctccactttctagaacatattctttactaatgttattgaaaccaatttctacttcatactgatgtttttggaaacagcaattaaagtttttcttccatgagttgagtccttaaaaaaaaaaaaaaaaaaaaaa

SEQ ID NO: 532 - DNA, 3528 bp, Homo sapiens
tgacagtgacttgggtcacatggtgcaagaccctctgtattgttcatggtacttgccatcaaaatgttcaaattaatggagcctgtgaaagcacaggttgtatggagtataaagcctatagagtttttttaaaatcttttttcttcttgaaacgtgtgcatgctgtttttgggaacaatacaaactgcatgttgaagtcagacaaattcaggtgctaaataatttgtttctctaatggacttagattgtatttgctatcaggttttataagagggctttttgtgtagcctctgaagttactctagtatatttcttatgtgtggagaggtggggcagaaatagaaaatgtcacatgttccccattattttaaggaaagaaaagataactttgtctcactaatttcatttcagacaagtggattttataggtaataggttcaattctcgatttaatttcatttccagagacactataaaatgacacaaaacttttccccctcactgttgtttttggaacaagacgacatatctcctggtaaatgcagtcatacatgatatggctcaatgcctggactgcctgccttgtaaataaccgatggcactcttaataaatgggaaaatgtttttccttagatttcatccacattttatagctaccatagcaaacacactgagtatttcaaaatagcactttgcctttttcctgaatgtgtgctccatgtcatcaagttcatcttactggaaagtttaagtggtgaaattagatggaacatactttgataatgcattgcatgtcaggttataaatatgaactggatttaatatttggccaagatagtcctcacaagtgcgtttggaaacatttgtcaaatgctgaacttagatttctggcctctcctgggagtcatctagatataggaaggcatcttagatgctcacctatacagtctcagtgctaataaaatggaatggcgtgggtgctgggtggtttataatgtgatgcctgtgggtggagaagtaactcacggatcttggccttttcactcttcacagaaactgcgccaaggccaagtcatcacattatacgggcattatgtgctgggggggttggggtgggttgcaggatgggagccttgatgatgaggatgggcagtgatgctgcctccaccagccatcagccaaccacaaccacaatgtacatcctctttgtctgcccttagctttgggactgggtagcagggagagggaaaactataagagcatttcaaagaaggagggaagttaataccttgaaaggagaactgacgtagaagcactccattgtccttacctcaatctggaatgggagattcccatctgtcagatcaggaaggataatgagctttgaaaagcactgaaaggctgggcgtgagccaccacgcctgtaatcccagcactttgggaggccaagatgggaggatcactagagcccaggagttcaagagcagcctgggcaacacggcgaaatcctgtctctacaaaaaatatgaaaaaattagcccggtgtggtggcaggtgcctgtaatcccagatactcaggaggctgatgtgggaggatcatctgagcccaggaggttgaggctgcactgagccatgatcacaccattgcattccagcatgggcaacagagtgagaccctacctaagaaaagaaagaaaagaaaagaaaagcattgggaaaggaagagggtatggtttagaaggcaataagaaatcttaggaagagtggagggtggtaggcacaagggatggtattaacaaaggcagagggaaggatacagaggagagggggggaaacacaaggaggatgtgggccgtctggccagaccaccttggtgccacagtggtgaccaaagtaaagaggtgggagaagctgcttccctcatttatctgaattgtaagctcagcaacactggcccagtagaaattcatgtacctgtagcagaaacttagctaaacacccttgtccttgaggcatttccacattttcagcttatttcgaattgttgccagcccagtttaatggtcttcagagccatcctgagtaaatgctggcttcaggtctccagctttgcattgtctacttttgatctctcactaaaagtaagatgagaagttgaaattgagacagcatattctaaactagctgagcctttgaagaattcttattagaaaaaatgaaattgcttgcgtgaagtgtgatggtgtgttaatacctacctagttacctagtatgagaatgatctgaattgttaaaagaaacaataggaaaacatattaggcattgttatttcaacaagaggattttaaatgtgtatcatttgagtatgtttatcttttaacctcagcactctacacccccaagtgcatatgggtctgtcaaagcctatactaactttgatgctgagcgggatgctttgaacattgaaacagccatcaagaccaaaggtgtggatgaggtcaccattgtcaacattttgaccaaccgcagcaatgcacagagacaggatattgccttcgcctaccagagaaggaccaaaaaggaacttgcatcagcactgaagtcagccttatctggccacctggagacggtgattttgggcctattgaagacacctgctcagtatgacgcttctgagctaaaagcttccatgaaggggctgggaaccgacgaggactctctcattgagatcatctgctccagaaccaaccaggagctgcaggaaattaacagagtctacaaggaaatgtacaagactgatctggagaaggacattatttcggacacatctggtgacttccgcaagctgatggttgccctggcaaagggtagaagagcagaggatggctctgtcattgattatgaactgattgaccaagatgctcgggatctctatgacgctggagtgaagaggaaaggaactgatgttcccaagtggatcagcatcatgaccgagcggagcgtgccccacctccagaaagtatttgataggtacaagagttacagcccttatgacatgttggaaagcatcaggaaagaggttaaaggagacctggaaaatgctttcctgaacctggttcagtgcattcagaacaagcccctgtattttgctgatcggctgtatgactccatgaagcaagacactaagggcgactaccagaaagcgctgctgtacctgtgtggtggagatgactgaagcccgacacggcctgagcgtccagaaatggtgctcaccatgcttccagctaacaggtctagaaaaccagcttgcgaataacagtccccgtggccatccctgtgagggtgacgttagcattacccccaacctcattttagttgcctaagcattgcctggccttcctgtctagtctctcctgtaagccaaagaaatgaacattccaaggagttggaagtgaagtctatgatgtgaaacactttgcctcctgtgtactgtgtcataaacagatgaataaactgaatttgtacttt

SEQ ID NO: 533 - DNA, 1529 bp, Homo sapiens
ggcgcgctaagcccgaggtttcttctcttttgcagtcctgcttcaccttcccctgacctgagtagtcgccatggcacaggttctcagaggcactgtgactgacttccctggatttgatgagcgggctgatgcagaaactcttcggaaggctatgaaaggcttgggcacagatgaggagagcatcctgactctgttgacatcccgaagtaatgctcagcgccaggaaatctctgcagcttttaagactctgtttggcagggatcttctggatgacctgaaatcagaactaactggaaaatttgaaaaattaattgtggctctgatgaaaccctctcggctttatgatgcttatgaactgaaacatgccttgaagggagctggaacaaatgaaaaagtactgacagaaattattgcttcaaggacacctgaagaactgagagccatcaaacaagtttatgaagaagaatatggctcaagcctggaagatgacgtggtgggggacacttcagggtactaccagcggatgttggtggttctccttcaggctaacagagaccctgatgctggaattgatgaagctcaagttgaacaagatgctcaggctttatttcaggctggagaacttaaatgggggacagatgaagaaaagtttatcaccatctttggaacacgaagtgtgtctcatttgagaaaggtgtttgacaagtacatgactatatcaggatttcaaattgaggaaaccattgaccgcgagacttctggcaatttagagcaactactccttgctgttgtgaaatctattcgaagtatacctgcctaccttgcagagaccctctattatgctatgaagggagctgggacagatgatcataccctcatcagagtcatggtttccaggagtgagattgatctgtttaacatcaggaaggagtttaggaagaattttgccacctctctttattccatgattaagggagatacatctggggactataagaaagctcttctgctgctctgtggagaagatgactaacgtgtcacggggaagagctccctgctgtgtgcctgcaccaccccactgccttccttcagcacctttagctgcatttgtatgccagtgcttaacacattgccttattcatactagcatgctcatgaccaacacatacacgtcatagaagaaaatagtggtgcttctttctgatctctagtggagatctctttgactgctgtagtactaaagtgtacttaatgttactaagtttaatgcctggccattttccatttatatatattttttaagaggctagagtgcttttagccttttttaaaaactccatttatattacatttgtaaccatgatactttaatcagaagcttagccttgaaattgtgaactcttggaaatgttattagtgaagttcgcaactaaactaaacctgtaaaattatgatgattgtattcaaaagattaatgaaaaataaacatttctgtccccctgaaaaaaaaaaaaaaaaaaaaaaaaaaa

SEQ ID NO: 534 - DNA, 1431 bp, Homo sapiens
aggtccgctacccacgtgggggctcagcgtgcacccttctttgtgctcgggttaggaggagctaggctgccatcgggccggtgcagatacggggttgctcttttgctcataagaggggcttcgctggcagtctgaacggcaagcttgagcaacgcggtaaaaatattgcttcggtgggtgacgcggtacagctgcccaagggcgttcgtaacgggaatgccgaagcgtgggaaaaagggagcggtggcggaagacggggatgagctcaggacagagccagaggccaagaagagtaagacggccgcaaagaaaaatgacaaagaggcagcaggagagggcccagccctgtatgaggaccccccagatcagaaaacctcacccagtggcaaacctgccacactcaagatctgctcttggaatgtggatgggcttcgagcctggattaagaagaaaggattagattgggtaaaggaagaagccccagatatactgtgccttcaagagaccaaatgttcagagaacaaactaccagctgaacttcaggagctgcctggactctctcatcaatactggtcagctccttcggacaaggaagggtacagtggcgtgggcctgctttcccgccagtgcccactcaaagtttcttacggcataggcgatgaggagcatgatcaggaaggccgggtgattgtggctgaatttgactcgtttgtgctggtaacagcatatgtacctaatgcaggccgaggtctggtacgactggagtaccggcagcgctgggatgaagcctttcgcaagttcctgaagggcctggcttcccgaaagccccttgtgctgtgtggagacctcaatgtggcacatgaagaaattgaccttcgcaaccccaaggggaacaaaaagaatgctggcttcacgccacaagagcgccaaggcttcggggaattactgcaggctgtgccactggctgacagctttaggcacctctaccccaacacaccctatgcctacaccttttggacttatatgatgaatgctcgatccaagaatgttggttggcgccttgattactttttgttgtcccactctctgttacctgcattgtgtgacagcaagatccgttccaaggccctcggcagtgatcactgtcctatcaccctatacctagcactgtgacaccacccctaaatcactttgagcctgggaaataagccccctcaactaccattccttctttaaacactcttcagagaaatctgcattctatttctcatgtataaaactaggaatcctccaaccaggctcctgtgatagagttcttttaagcccaagattttttatttgagggttttttgttttttaaaaaaaaattgaacaaagactactaatgactttgtttgaattatccacatgaaaataaagagccatagtttc

SEQ ID NO: 535 - DNA, 1078 bp, Homo sapiens
ggacccaagggggccttcgaggtgccttaggccgcttgccttgctctcagaatcgctgccgccatggctagtcagtctcaggggattcagcagctgctgcaggccgagaagcgggcagccgagaaggtgtccgaggcccgcaaaagaaagaaccggaggctgaagcaggccaaagaagaagctcaggctgaaattgaacagtaccgcctgcagagggagaaagaattcaaggccaaggaagctgcggcattgggatcccgtggcagttgcagcactgaagtggagaaggagacccaggagaagatgaccatcctccagacatacttccggcagaacagggatgaagtcttggacaacctcttggcttttgtctgtgacattcggccagaaatccatgaaaactaccgcataaatggatagaagagagaagcacctgtgctgtggagtggcattttagatgccctcacgaatatggaagcttagcacagctctagttacattcttaggagatggccattaaattatttccatatattataagagaggtccttccactttttggagagtagccaatctagctttttggtaacagacttagaaattagcaaagatgtccagctttttaccacagattcctgagggattttagatgggtaaatagagtcagactttgaccaggttttgggcaaagcacatgtatatcagtgtggacttttcctttcttagatctagtttaaaaaaaaaaaccccttaccattctttgaagaaaggaggggattaaataattttttcccctaacactttcttgaaggtcaggggctttatctatgaaaagttagtaaatagttctttgtaacctgtgtgaagcagcagccagccttaaagtagtccattcttgctaatggttagaacagtgaatactagtggaattgtttgggctgcttttagtttctcttaatcaaaattactagatgatagaattcaagaacttgttacatgtattacttggtgtatcgataatcatttaaaagtaaagactctgtcatgcaaaaaaaaaaaaaaaaaaaaaaaaaaaaaa

SEQ ID NO: 536 - DNA, 4119 bp, Homo sapiens
cgcatcgcgcgatggcgcgggcgggacagtgcttgtgaaactgaacacaacaaaagtatggatatgggaaaccaacatccttctattagtaggcttcaggaaatccaaaaggaagtaaaaagtgtagaacagcaagttatcggcttcagtggtctgtcagatgacaagaattacaagaaactggagaggattctaacaaaacagctttttgaaatagactctgtagatactgaaggaaaaggagatattcagcaagctaggaagcgggcagcacaggagacagaacgtcttctcaaagagttggagcagaatgcaaaccacccacaccggattgaaatacagaacatttttgaggaagcccagtccctcgtgagagagaaaattgtgccattttataatggaggcaactgcgtaactgatgagtttgaagaaggcatccaagatatcattctgaggctgacacatgttaaaactggaggaaaaatctccttgcggaaagcaaggtatcacactttaaccaaaatctgtgcggtgcaagagataatcgaagactgcatgaaaaagcagccttccctgccgctttccgaggatgcacatccttccgttgccaaaatcaacttcgtgatgtgtgaggtgaacaaggcccgaggggtcctgattgcacttctgatgggtgtgaacaacaatgagacctgcaggcacttatcctgtgtgctctcggggctgatcgctgacctggatgctctagatgtgtgcggccggacagaaatcagaaattatcggagggaggtagtagaagatatcaacaaattattgaaatatctggatttggaagaggaagcagacacaactaaagcatttgacctgagacagaatcattccattttaaaaatagaaaaggtcctcaagagaatgagagaaataaaaaatgaacttctccaagcacaaaacccttctgaattgtacctgagctccaaaacagaattgcagggtttaattggacagttggatgaggtaagtcttgaaaaaaacccctgcatccgggaagccaggagaagagcagtgatcgaggtgcaaactctgatcacatatattgacttgaaggaggcccttgagaaaagaaagctgtttgcttgtgaggagcacccatcccataaagccgtctggaacgtccttggaaacttgtctgagatccagggagaagttctttcatttgatggaaatcgaaccgataagaactacatccggctggaagagctgctcaccaagcagctgctagccctggatgctgttgatccgcagggagaagagaagtgtaaggctgccaggaaacaagctgtgaggcttgcgcagaatattctcagctatctcgacctgaaatctgatgaatgggagtactgaaataccagagatctcacttttgatactgttttgcacttcatatgtgcttctatgtatagagagctttcagttcattgatttatacgtgcatatttcagtctcagtatttatgattgaagcaaattctattcagtatctgctgcttttgatgttgcaagacaaatatcattacagcacgttaacttttccattcggatcattatctgtatgatgtggtgtggtttgtttggtttgtccttttttttgcgtttttaatcagaaaacaaaatagaggcagcttttgtagattttaaatgggttgtgcaagcattaaaatgcaggtctttcagaatctagaactaggcataaccttacataatactaggaaaattatgagaaaggggaaatttttggttaaataagagtaaggttcaaacacaagcagtacatgttctgtttcattatgctcgatagaaggcttttttttcacttataaggcctgattggtcctacccagcttaacggggtggggtttttttgtttgttcagacagtctgttcttttgtaaacatttttagttggaaaaacagcatctgcattttccccatcctctacgttttagagaggaatcttgtttttgtgtgcaacataagaaaattatgaaaactaatagccaaaaaacctttgagattgcattaaagagaagggataaaggaccagcaataataccttgtaagttgcttttgtttgtaaaatctgagcttatagttttccttagtgagtaaattcataaggatgggaacatttaaattaagttaatgggcctttaaaaaaaaaaaaggaaacactcatacctgtagttggaggatgaatactggagacgggttaccaatgtcaggttatactaaaactaaatcagaaagtctgaatgtagcacataatggttctcttctgttgtccaaggctgtaaaatggacagccttgtcacacctccccggtgctgttttacaacgtgagggtagacgctgtcagtaacccagagggaccaggccttcctaggttttctaggcagtcagctgttaaccactcacttagtaaatgtcataactacacctgctccaggaccaatcagtgaaacctgctcggaattaaaggcttcctctgggtgcctgctgaacaactgagctcatgtcatgggcatgtggtggtttctctgttgcctgaaagagccattaaagtcagtcgtgcgtgaagcatctctcttctaaaggatgtgtatttccataaatgctttctgaggatccggtacaaaatgatttcccaaagttctgaagtgccttgagaacatgtgggtccgagtgttataacagactcctcccccgggtcaccttttgcctggtcatcctgttagagtacatctttggaaatccagggtaatattctctttcagagatgctcattgtgtaactctgtgtagggagatagtcactttaaacagctcaaagtagctagctaaaggagtagccttaaatacctaaaagatgacagaagcatagcccttaacaaatcttcagcttgtctctcagtatttcccaatcatgaaaatcccttgctatgtctttcctactagaaatgttctagaatcgctggacggtggggtcagagggcagtcggtatttaggccgtgagcttcccatactactgcaggtccaactcctggcaaccgcgggctcaaggcaggtcattggaatccacgttttggccacagtagttgtaggattgcttttctgtatcataattttagaatgctcttaaaatcttgaggaagagtttttattttttatttatttttgagatggagtctctgttgcccaggctgcagtgcagtggtgccatctcagctcactgcaacctccacctcccaggttcaagcgattctcctgcctcagccacctgagtagctgggagtacaggcatgtggcaccatgcctggctaatttttgtatttttaatagagttgagatttcaccatgatggtcaggctggtctcgaactcctgacctcgtgatccgcccgcctcggccccccaaagtgctgggattaacgggtgtgagccacggcgcccagcccaggaagagtttttaaattagagctctgtttaattataccactgggaaatcatggttacgcttcaggcatattcttccccagagtactacttacattttaaatttcattttgtaaagttaaatgtcagcattccctttaaaagtgtccattgttctttgaaagtagacgtttcagtcattcttttcaaacaagtgtttgtgtaccttttgccaagctgtgggcatcgtgtgtgagtacagggtgctcagctcttccaccgtcattttgaattgttcacatgggtaattggtcatggaaatgatcagattgaccttgattgactgtcaggcatggctttgtttctagtttcaatctgttctcgttccttgtaccggattattctactcctgcaatgaaccctgttgacaccggatttagctcttgtcggccttcgtggggagctgtttgtgttaatatgagctactgcatgtaattcttaaactgggcttgtcacattgtattgtatttttgtgatctgtaatgaaaagaatctgtactgcaagtaaaacctactccccaaaaatgtgtggctttgggtctgcattaaacgctgtagtccatgttcatgcc

SEQ ID NO: 537 - DNA, 109646 bp, Homo sapiens
gatcctcccctgactcgctgagcctttcctggaccgtcccccagggccgctttgactccttcaccgtgcagtacaaggacagggacgggcggccccaggcggtgcgtgttgggggccaggagagcaaggtcactgtgaggggcctggagcctgggcgcaagtacaagatgcacctgtacggcctccacgaggggcggcgcctgggcccggtgtctgccgtgggcgtcacaggtgagtgagtgtgggtggggcagggttggaagacagccctagaaaatgtgcccttctctaccattttcctatacatatttctgtcttgatggggctcacagtgaaaggaatatagcaacattatggaaagacatgtcatggagagacaggctgcaatccagcaaatgaagcaaaggcgggtgagcatgtgatagggaggcccagggctcaggtcaggaccagacagggacgcctaagtcaccctgcccatgggtacccaggggacagccaggacctgaggccaggcatgccttagcttggtgacagctttagagagaaggtgaagtgtgtcagataatcacagctggtgcaaaggccaggaggctagaaagagcatggcacgtgagaggcactgaggattgagtggggtgtcctttacggtgagtatctcatcctgaagtgtgggagcagaggaggggaccactcaccaggcctggggtctcccagggatgaggatgtggttgcccaggtctgtgctgagatggccccagcagctgtgcctgtgtgaagctcatccgtgggggctgaagatggggatggggtggcagggagcctggaggcagcgaggccagtaggcagttggtggccctggtgagaggtgacagtggctcaaactaggatcggggactggaggtggggtaggaaggtatccaggggaattcagggtaaagatgctctgaggctgctggcagctggtgaggagctggatccaggaacacaccccaggctctggcctcgggaggagtgtgctgagcttgttgcggagcaaagacagaagcccagtgaacaaaagatggcgaagagaccccagtgctgggaggccaggggtgcagaggccgagtggggctgtgctcaaaagagaggcggtgctggagggacagggagaggtggcctgggtgttgggaggtgggggtgaggtgggggctgagggcaggagggtcagggtgagggataggaaaggccacaggagaggagaggatgaagagctgtgctggaggggctgtgggcagcatcgtcctgctcttgggcactttgtgttttgtgacacatcctttctatgctgaactgaggagccagggacctcactgtccccacacgtgtctgtccaactccagaggatgaagccgagaccacccaagcagtgcctaccatgacccctgagccccccatcaagcctcgcctgggggagctgaccatgacagatgccacccctgactccctcagcctgtcctggacggttcccgagggccagtttgaccacttcctggtccagtacaggaatggggatgggcagcccaaggcggtgcgggtgccggggcacgaggacggggtcaccatctcaggcctggagccagaccataaatacaagatgaacctgtacggcttccacggtggccagcgcgtgggccccatctctgtcattggggtgacgggtgagtggatgatggcagccccagggtgggagccgtgggagggtcaccctcttgctctttggtgatgactggtggggaatgggccaggggtccggtcagcaccacagacctgcttgtggctggggctccccttgggccttcctctgaggctgacccctggctcctcctgagcagggaggggccatcaggagttctgctgtgctggtgactgtcccaggtcccccacagctgaccctggaacttgtcatgtgtgttagctgtcagttgagcaggaccacccagccccaagaatgggcttttctgaaatgacctcacatacccagtagtggccatggtttctccctccttcccttgaagacctgagcacatcccccaggcacctggcatcctctctatatctccttttctcagctgcagaggaagagacccccagccccacggaactcagcactgaggcccgggagccccctgaggagccgctcctgggggagctgacagtgacaggatcctcccctgactcgctgagcctctcctggaccatcccccagggccacttcgactccttcaccgtgcagtacaaggacagggacgggcggccccaggtgatgcgtgtcaggggcgaggagagcgaggtcaccgtggggggcctggagcccgggcgcaaatacaagatgcacctgtacggcctccacgaggggcggcgtgtgggcccggtgtccaccgtgggtgtgacaggtgagtgtttgtgagtgaggaagatggccctagaagatgttgctttctctgcaacttcatgaaaacaaaaatattctcaccagccgggcttcttttgcacgtttccatgcttggggatcttgctaagaggcagattggggttcaacaggtttgggctagggccagagattctgcatttccaacaagaaatgatgcggatgctgctggcccatgatcacgccccttgagtagcaaagttcttcacgacaaaggaattggaccctcttttgaaatctgttgaagagaatttttctgcgtccctgattcctggtagtgtgctttctctgtggagttgactaggggccgtgaaggaagacagaaggcagtgaggggcagcgcgtcgactgcacactctggaagcccactattggaataggaataggaacagacctttctcaccaatgggccaatttgttcattcagcaaagaattccttgccctgatccggacactgtaattttagggtatcaatgtcctctggccaacgacctccagaaactcacctaaaattgaatggatggaattatgctccatgcagtgcaggaggactgtggggtgacttaggaagaggctttagaaagagattgttaaggaactgggcttgtgtttggtgttttaggaaagcatttaaggaagcaaggttttgctctttattagacgctgtcaggaagaagggataaccctattaccgggcgtctcactaagtcttatctttggggaggtcaactagagcaaggccaaagctgccattggtaaagaagcagctatcactcagattagctggatgggtgatgtttggttatttttgtgctttggaaaatgttagagttcatccttactgagacatgatcacagactggccttgttcttgtcttgatccatcctactgacaaatggcctagtctgatgttgatgttccatgaaattgtctgttcaactggaccacgccaagaccagactgtgccaggccagccccaagcagccgtggcctggcagagggaaagggcagctcacgggtgtcagggctgcctttttctttcataggcggaagctggaaagtgacacacacaagttcatgttttcatggggctcacaattgtgggcacaagcagaaaaccggaaagtaagcaaagaaggatgagcatgtggagcccaggagccaagccaggattgggaagggacagtgaagtcactctgcccacaagtacccaggggacagccaggacctgaggccaggcaggccttagcttgatgacagctttggagaggaagtgaagcatgtcaaatcatcacagctagtgcaaaggccaggaggctagaaagagcatggtgtgtgagagacactgaggattgagtggggtgtcctttgcagttggtggatcatcctgaagtgtgggagcagaggaggggaccactcaccaggcctggggtctcccagggatgaggatgtggttgcccaggtctgtgctgagatggccccagcagctgtgcctgtgtgaagttcatccgtgggagctaaagatggggatggggtggcagggagcctggaggcagggaggccagtaggcagttggtggccctggtgagaggtgacagtggctcaaactaggattggggactggaggtgggggaggaaggtatccagggaaactcgggggagaggtactctgaggctgctggcagctggtgaggggctgggtccaggaacacaccccaagctctggcctcgggaggagtgtgctgagcttgttgcggagcaaagacagaagcccagtgaacaaaagatggcgaggagacaccagtgcagggaggctaagggtgcagaggccgagtggggctgtgctcaaaagagaggcggtgctggagggacagggagaggtggcctgggtgttgggaggtgggggtgaggtgggggctgagggcaggggggtcagggtgagggataggaaaggccgcaggagaggagaggatgaagagctgtgctggaggcgctgtgggcagcatcgtcctgctcttgggcactttgtgttttgtgacacatcctttctatgctgaactgagaacccagggacctcactctccccacacgtgtctgtccagctccagaggatgaagcagagaccacccaagcagtgcccaccacaacccctgagccccccaacaagcctcgcctcggggagctgaccgtgacagatgccacccctgactccctcagcctgtcctggatggtccccgagggccagtttgaccacttcctggtccagtacaggaatggggatgggcagcccaaggtggtgcgggtgccggggcacgaggacggggtcaccatctcaggcctggagccagaccacaagtacaagatgaacctgtacggcttccacggtggccagcgcgtgggccccatctctgtcattggggtgacaggtgagtgtacgatgggagccccagagtggggcctgtgggagggtctccctttctctggtgatgggtgaactggcccaggaagcccctctgctcttggctgagccatggtacttttttgtctttccccacttccctgaggactgacagatcttcctgggtggagaagggccctgtgagctctgttggtggctgtcccaagttccccagcactgacctcagagcttgtcatgtgtgttgactgtaaactgagcaagaccacccagctccaaagatgggcctctccaagctgaccccaggacccccactcatggccacagcttcgctctccttcctcacaagacccaaggacatcccccagggaagctgcctcaccttctctgtcccctcttctcagctgcagaggaagaaactcccgcccccacagaacccagcacggaggccccggagccccctgaggagccgctcctgggggagctgacagtgacaggatcctcccctgactcgctgagcctctcctggaccatcccccagggccgcttcgactccttcactgtgcagtacaaggacagggacgggcggccccaggtggtgcgtgtcaggggcgaggagagcgaggtcaccgtggggggcctggagcccgggtgcaaatacaagatgcacctgtacggcctccacgaggggcagcgcgtgggcccagtgtccgctgtgggtgtgacaggtgagtaagtgtgagtgaggcgaggtggggaagatggccctggaagacactgctgtctctccagtcttcgtgaaaacatactctgaagagtattccttcctttgtgtatccaaatgcctggagatttttgttaaaaagcagatttggattcagcaggcttggcctagggcaagagaccatgcatttctttctttttctttctttcttttttttttttttgagatagagtctcgctttgtcacccaggctggagtacagtggctcaatctcggctcactggaacctccgcctcctgggttcaagtgattctcctacctcagcctcctgagtaactgggactacaggcgtgcgccaccacgcccagctaattttttcatatttttagtagagatgggtttcaccgtgttagccaggatggtctcaatctcctgacctcgtgatctgccctcctcggcctcccaaagtgctgggatcataggcgtgagccacggcgcccagccgaccatccatttctaacaagattctcatctatcttgatgccactggtccaaggaacacactttttttgttgttttttattgtagtaaagtacacttgacataattcgccattctaatcgctttctagtttgcagtccagcatgaagtccactcacattgctgtggactgtcaccctccacttccagaactcctcttcccacactgaaacttcctacccactagacacgaactcccattctccccttgccccagcccctggcaacaccattctactctctgtctctatgaatttgactctaggtacctcatataagtgcaatcatacaatatttgtcttttttgaatggttcatttcattaaatacaatgtctttaaggttcatctatgtcgtagcatcagtcagaatttcctttttattttattttctgtggcaatgggggtctcggtatgttgcccaggctggtctcaaactcctggcctcaagcgagtctcccaccttgacctcccaaagtgctgggattataggcaagagccactgcacctggccagaacttccttccttttcaggctgaataatgtttcgttttacacatacagaccacactttgctcatcctttcatccattgatggacatctgggttgcttccacctcttagctatcaagaataatgctgctatgaatatttgtgtgcaaatcacagaacacctttgtagcaaagctcctcccagtaacagatttggaaactctcttagaatttgttgaagcgaatttttcttgcattcatgaatcctcacagaggttaggctcagagttagggttcctgtcctaatgggaaaagttcctgtcctaatggggctaacgtcatgggggacaggctgtggaccagtaagaaagcaaaggcgggtgagcatgtgacaagaagcccagagccaggcaggaatacctaaaccaccctacctgtggatactcaggggacagtcaggatctgaggccaggcaggccttagcttggtgacagctttagagagaaggtgaagcgtgtcagatcagcacaggtggtgcaaaggccaggaggctagaaagagcatggtgtgtgagaagtactgaggattgagtggggtgtcctttgcagtgaatagatagtcctgaagtgtgggagcagaggaggcctggggtctcccagggatgaggatgtgattgcccaggtctgtgctgagatggccccagcagctgtgcctgtgtgaagctcatctgtgggggctaaagatggggatggggtggcagggagcctagaggcagggaagccaataggcagttggtggccctggtgagaggtgacagtggctcaaactaggatcggggactggaggttggggaggaaggtatccagggaaactcgggggagaggtaactctgaggctgctggcagctggtgaggggctgggtccaggaacacaccccaggctctggcctcgggaggagtgtgctgagcttgttgcagagcaaagacagaagcccagtgaacaaaagatggcgaggagaccccagtgcagggagggtaagggtgcagaggccaagtggagctgtgctcaaaagagaggcggtgctggagggacagggagaggtggcctgggtgttgggaggtgggggtgaggtgggggccgagggcaggggggtcagggtgagggataggaaaggccgcaggggaggagaggatgaagagctgtgctggaggcgctgtgggcagcatcgtcctgttcttgggcactttgtgttttgtgacacatcctttctatgctgaactgagaacccagggtcctcactgtccccacacgtgtctgtccagctccaaaggatgaagccgagaccacccaagcagtgcctaccatgacccctgagccccccatcaagcctcgcctgggggagctgaccgtgacagatgccacccccgactccctcagcctgtcctggatggttcccgagggccagtttgaccacttcctggtccagtacaggaatggggatgggcagcccaaggcggtgcgggtgccggggcacgaggacggggtcaccatctcaggcctggagccagaccataaatacaagatgaacctgtacggcttccacggtggccagcgcgtaggccctgtgtctgccattggggtgacgggtgagtgaatgatgggagccccagggtgggagctgtgggagggccacctcttgctctttggtgatgactggtggggaatgggacaggggtctggtcagcaccacagaactgcttgtggctggggctgggactccccttgggccttcctatgtggttgacccctggctccccctgagcagggaggggccatcaggagttttgctgtgctggtggctgtgccaggtccccccacagctgaccctggaacttgttacgtgtgttagctgtcagctgagcaggaccacccagccccaagaatggacttctctgaaatgacctcaggtcccccagtcatagccttggcttctccctccttttccccaggacccaaggacatccccctcactctctctccctccttctccactgcagaggaagagacccccagccccacagaacccagcactgaggccccggaggcccctgaggagccgctcctgggggagttgacagtgacaggatcctcccctgactcgctgagcctctcctggaccgtcccccagggccgcttcgactccttcaccgtgcagtacaaggacagggacgggcagccccaggtggtgcgtgtcaggggcgaggagagcgaggtcaccgtggggggcctggagcccgggcgcaaatacaagatgcatctgtacggcctccacgaggggcagcgcgtgggcccagtgtccaccgtgggcatcacgggtgagtggggggacaggccctcgtccccaggtttacctctgcagcccccttgtgtttctcctttggatcttggcacctcttttgactgggcctctaggtttctgtcttttctcccatgttgctaatgatcctgcctcatccttggattcatggagactgtgtggagtcagatgggcaggtagtccatgccctgtttgttgtagcttccttctcccattgtgatctggaacctccatgttgctcgtgtgctcatttgttagtcttcaggctcccttaaggagtattttagtggctcagaaagtgcttcagatccagctgcccagatctgcatgtgccttcgaatgtagtgattgtgcgactttgcaggcgtttcctaaccttgtgcttcagattcctgcaaagttggggtgatgataataatggcacccacttcatatgttgtgcgagggttaaatgcaccactgtttgtgagctgcttacagcaatgcagggcacagattctaaaacaagcgttttagaggaggccgctaagaaatgctcactccagtcctgggagagcactgcctcccttgcgcagggtcctgcctcctgacccatgggcctgctctgctcttttcagcgcccctgcccacaccactgccggtggagccccgcctgggggagctggcggtggcggccgtgacctcggactcagtgggcctctcatggacggtggcccagggcccctttgactccttcctggtacagtacagggacgcgcaggggcagccccaggcagtgcctgtgagcggagacctccgagcggtcgccgtctcggggctggacccggcccgcaagtacaagttcctgctctttggactccagaatgggaaacgccacggcccagtccctgtggaggccaggaccggtgagtgagggctggaggcctcccgcggccagagccttcgcccccttgtggcacctgttggaatttcacgttctgtgccccacactccagtcctcagcacccactgatttattgggtccaggaaaacccaggccctgagctctcctctcccactcacactcatccctctccctactttccctgcaccccaggggacacttgctttcttgtctggctcctcttttattcctactcctggcccagtcaccctcccgttcctgggaccggctcacagagccatagcagcccaggaagctccgtggcccctttgcctccatcccactctccatgcacctcactgtcttttccagccccagacaccaaaccgtctccccgcctgggggagctgactgtgacagatgcgacccctgactccgtgggcctctcgtggacggtccctgagggcgaattcgactccttcgtggtccagtacaaggataaggatggtcggctccaggtggtgccggtggcagccaaccagcgggaggtcacagtccagggcctggagcccagtaggaaatacaggttcctgctctatggtctgtcaggcaggaaacgactgggccccatctctgctgacagcaccacaggtgagtcccagtccagcctccaccttttccagagctgcctctcatccgagccctcagagctggccctgcagccttcccgtgagattccctctatcagccctgacacaaccatcttaactccgaaagtgagtccctctgtgtgtcaggcacagttctgaagcatatgcattacttcctttcattcgctgactgctgaggaaataaaagggacacgggctttggggccagcagatctgtgttccagttccagtcctagcctttgccagggtgaccatggacaagccgcttcatccccgggacctcagtgtcctcacctgcataatgctgggaatggcgctggactcagtagtggttcccatcctcctccctcctccctgactcggagccgaggggtggaagaaaagggagggcttggctatggaaagacgatggaaaaacctggtgtcactatgcctatgactcagctccctgaggaaggggtgtggtgggtcaccgaccctcaccccactcccaggaccatgagtcactatgcccagaggaggacagagcagccggccagtctgggcctgggtccctgggactccgtaattctcttcccaaaccctcactgtggggacggggtacagatccccacccatcggccccagccccacccgggcaagcctctgctctgccctctgttctcccagctaatcccctgtcttctccctgccccaccctggctgccccggcccagtggggtcagtgtggggctggggaagcaggaggcacggatgttcaggctgatggccacaaggggacaagggggagatcacagcctggcagtgatgggagccgtgcattggccggctgcccagaccagctctcgatgtttggggtgtctccgtgacaacccagagacctccggggagtctctctcagctctggcctcattcttgctcaggggctgggggtcagggtaaacaaaggccctctctgcacccccagccacccatccctcgggagatgatctgtaatgaatttggcgcatcctcgatcacagcagggaaggggcggggcaggaaggagtttgggcagcagcctccagaggaggagggggctgttctccctcattcctgtggggcatggcgggagcaggcctgtgtgtctcctcaaggagctgtccctggggctacactggagggaccatttcccagaacctcacacctccgggaggctgccagggcttaggcaaaggcagcatgtgactaagagctttccctcctccctctgcacagctcccctggagaaggagctacctccccacctgggggaactgaccgtggctgaggagacctccagctctctgcgcctgtcctggacggtagcccagggcccctttgactccttcgtggtccagtacagggacacggacgggcagcccagggcagtgcctgtggccgcagaccagcgcacagtcaccgtagaggacctggagcctggcaagaaatacaagtttctgctctacgggctccttgggggaaagcgcctgggcccggtctctgccctgggaatgacaggtgaggctgctgtgcctggctatagcaagccagcttgtgtgggtttccttgtgcatttgggctgaagacaaagatgactgcaggagtgggcaggccggagtggggcgccctggcctgtccccaggaaggaggaggagtctgcagccctgtgggcttcaacatccatcaaggagtccagagcaggagccaggccaggcgggagggaaaggccctgggaggggctctctaatctcccagccccgactctgccccgtcactgccactgctcctcattactcgctggggctgctgtcgcctccccgaagggtggccttgtccagatagcggcaaacctccctgccgtggatgagtcaggagcattttcttaagaggaacatcactggaaaacaaaatgagcggggacacagaaaccaacagcagtggctgcatttgtggtacaggctcctcttccagagctcgctgatgcccacctcagacaggcctgaccacggcacggctggtgggatttgccagtcacctcaaccagccagttccaccctcagcttctctcagaagggagcaccacactcctcaagctcagtgaatgtatcccggcatgggtggggccagagcctgtgatatctcgaggtgggctcggcaggacaccggggtgtggaagggggaagcgagcacctgactcagacagcgcgggagctcgcaggagtcacgaggccacagcgacttcattgtctgactgggcctggacctataaacttcccacctcagccttgggccaagcctggaagataaaaatggagcaccccatggcgcccctcactcagattctcccctgggcttctcccacgcagccccagaagaggacacaccagccccagagttagccccagaggcccctgagcctcctgaagagccccgcctaggagtgctgaccgtgaccgacacaaccccagactccatgcgcctctcgtggagcgtggcccagggcccctttgattccttcgtggtccagtatgaggacacgaacgggcagccccaggccttgctcgtggacggcgaccagagcaagatcctcatctcaggcctggagcccagcaccccctacaggttcctcctctatggcctccatgaagggaagcgcctggggcccctctcagctgagggcaccacaggtaccaccaggcgtctccggcctctagcctaggactcagaagggagaaacgggggctcagaaggggtggtcgcagggaaagagcgtgaggcgggtaccagggagagaggatggatgggctggatgcgagtggcctttagctctgccccacaggacccccctgtggctgcaagtccctggttacagatagagaaacaggggcagggaggggggtggaagggacgtgctctgggtcaccaagctggtgtgcttctgtctccaatcccttctcccccacccactccgtgcagggctggctcctgctggtcagacctcagaggagtcaaggccccgcctgtcccagctgtctgtgactgacgtgaccaccagttcactgaggctcaactgggaggccccaccgggggccttcgactccttcctgctccgctttggggttccatcaccaagcactctggagccgcatccgcgtccactgctgcagcgcgagctgatggtgccggggacacggcactcggccgtgctccgggacctgcgttccgggactctgtacagcctgacactgtatgggctgcgaggaccccacaaggccgacagcatccagggaaccgcccgcaccctcagcccaggtaaggacccacacacactctgccccaaagtgggggtctttgtacttcacgggggggacctagtgcctcagccagcggtgggggtgggcgagttggtggtgggcctggaggaatctgcagagcgacttccattcctggggactagaggaaaaggggtggtgagcctgtgctggagcagaggcgagggggggactcgcagggagaagcctccctgcccctgcctgcgtcattgttccttgacccctctgcagttctggagagcccccgtgacctccaattcagtgaaatcagggagacctcagccaaggtcaactggatgcccccaccatcccgggcggacagcttcaaagtctcctaccagctggcggacggaggtggtgcctttgccatgtgctcatcgcctcgcatttcctctcccccctgcactctgcccaccctccagccgccctggggttccctgggtaaccctcgatccccaatgttttcaggggagcctcagagtgtgcaggtggatggccaggcccggacccagaaactccaggggctgatcccaggcgctcgctatgaggtgaccgtggtctcggtccgaggctttgaggagagtgagcctctcacaggcttcctcaccacgggtgagatggactgggacccggggcaagaggtgggagccaagaaaacggcatgggtgggagttgagagagaacgaggagggtgaaagggaggtggtggaggctccgattgcggacgggaggccagtggagtctggggaggcacggagtagagagagccgcggggacccttctgagcccctccccttcccccagttcctgacggtcccacacagttgcgtgcactgaacttgaccgagggattcgccgtgctgcactggaagcccccccagaatcctgtggacacctatgacgtccaggtcacagcccctgggggtgagcaggcctgaggcctctggaggggacttgttcagggtggggattgcaggggggaggctggactctggccgaggatggagggggcaggccttgatgcccctctctacactcccagccccgcctctgcaggcggagaccccaggcagcgcggtggactaccccctgcatgaccttgtcctccacaccaactacaccgccacagtgcgtggcctgcggggccccaacctcacttccccagccagcatcaccttcaccacaggtagggtctgtggggtgtgtgggacagggagaggaggtagagggagccaggttgggcctcatccccatctcctcttcctgctttccctcctagggctagaggcccctcgggacttggaggccaaggaagtgaccccccgcaccgccctgctcacttggactgagcccccagtccggcccgcaggctacctgctcagcttccacacccctggtggacagaaccaggtgccccggccccactgacccaactcccctccctgggtgattccaggaggtgctgcctctggccctcccggagggtctccacctccctctcccctgacccccccttgtctgtcccacaggagatcctgctcccaggagggatcacatctcaccagctccttggcctctttccctccacctcctacaatgcacggctccaggccatgtggggccagagcctcctgccgcccgtgtccacctctttcaccacgggtacctggacgcacgggcccggggccgggggctgggtgggcagccagggcctaaggcttggaaaaggactggcccctgctctcctctcccaggtgggctgcggatccccttccccagggactgcggggaggagatgcagaacggagccggtgcctccaggaccagcaccatcttcctcaacggcaaccgcgagcggcccctgaacgtgttttgcgacatggagactgatgggggcggctggctggtgggtggcattgggaagcccaggggtctgtgcagggcagggtctgttgccccgggagccagaggctgatggtgcccccacttgcttcccaggtgttccagcgccgcatggatggacagacagacttctggagggactgggaggactatgcccatggttttgggaacatctctggagagttctggctgggtcagtgcctcacagggactggggaactacggatggggatgggggccctgtggacaccaggaccctgatgagggcacgtatcccacccccaggcaatgaggccctgcacagcctgacacaggcaggtgactactccatgcgcgtggacctgcgggctggggacgaggctgtgttcgcccagtacgactccttccacgtagactcggctgcggagtactaccgcctccacttggagggctaccacggcaccgcaggtaagcagaggctgtgaggctgggagggtgaggctgggaggggaggccctcatggctccttcctccaccctgcccaggggactccatgagctaccacagcggcagtgtcttctctgcccgtgatcgggaccccaacagcttgctcatctcctgcgctgtctcctaccgaggggcctggtggtacaggaactgccactacgccaacctcaacgggctctacgggagcacagtggaccatcaggtgaggggtggggaggcggctcagagctggggtggctggggctcggcctgcctaggtttcagccccacagtgtaacaggcaagggactgagtggctgggtgaaatggaacaatcatgccagcctcgcagagggagctggagttgatttattggctggaaagggccagctcagaattaagcctcaatcctctgcagcggagggtcaggaagggagctctgcggggaggttggttgagtgctgggagctacctccttaaggggaatgggaggagcagatgggacatccggctttgactctctcttgacaacccctttcccagggagtgagctggtaccactggaagggcttcgagttctcggtgcccttcacggaaatgaagctgagaccaagaaactttcgctccccagcggggggaggctgagctgctgcccacctctctcgcaccccagtatgactgccgagcactgaggggtcgccccgagagaagagccagggtccttcaccacccagccgctggaggaagccttctctgccagcgatctcgcagcactgtgtttacaggggggaggggaggggttcgtacaggagcaataaaggagaaactgaggtacccggctggcatcggtcctgccccatcactggctctggcccgggctgtgggcccccatcccccggggctgcagccgcacttggaaaggctgcatcttgaggatgacactgcagtggggcaggggctgcagggagggcagggcgtccccggagggcagcagcgtgaaggcctgcagcagtcgggtcagcaccacgaagagctccaggcgcgccagcggctcgcccaggcacacgcgggcaccgcagccgaaggccagagctctggagttcttgcctggctccaggaagcgatctgcgggcgggtggacaggtgggtggggaggcgttcagcggcagcggggaccagcctccaccacattttcacggcaggcccccggccccccacataccaggccagaactcatgtggcctctcccagaccgtctcatccaggtgggcgccttggaggttcggaatgatgactgtgccctcagggatgtcgtagccggagatgctgaagggggctggagttagaggctggccaggacctccctgggctcgggctttcctcactcatccccaaccctcgggagtcacctgctgggccgtgtggtgcggtggggcaaggctaagggcacaacgggccgcaggcgcagcacctcggcgatggtggcattgagcaagggcagccgtgcacggtccttgtaggggacccgggagctggaggcaccagggcccagttcgtggtctagctcctcctgcagtcgctgctgaatctggggaatgatcgggtggagtcctgccccagcagcccacagctgcccagcctccagccgctccctcagcaacccagtgagcctgagtgccggtgaggcaagcacagccccagccgcacagtgctcagagctgagtgagggtgcccaccgccctggccaggttgctgggaaggagccttttgcttgtccccaggacgcacctcagggtggtgaagcaaaaaaaccacggcccaggagagggtgtttgctgtggtctcagtgccaccgatcaggaggtccactgcagccatgtgcacgtgcccttccaggagctgtccagagccctcttccatgctcggctgcgccaccccttggagcatgtagtccatcatgtccctccactggcctgccacgaggctctcctgcagagggtgaaaggagcgggctgagcggctggcctggggagaggagtacagagtggcaacaggcccataactggggtatgcaaaagaacccgcctcatagcaatgctgaggccggtagcatcactggctgtgggccgaggggaggccgtccacgtacagtccccaccttgtgctgcctcagctgcatctccacgatgtgatccctcttctctatggcctgcttcagcctccggagacctggattggggaagaactgcggcaggaagcatgagaatgcagctgtgggaaggagcctctccctccaccccagcctctcccctacaacccaggggtgtctaggctccaggtcctcaccctgagaaagggaatcacgtccacaatttggatggaccagtggctccaggtttttaacacctcctggatacatttgtaataggcaggcattaagttgtcgtcctgccagaaaaggagggagtactttcagttcaggacaaggagaggctcagggaggggctgggggtgggcctgaggggctgtgaggcaccttgatcttgtctccgaaggtgaggtaacagatgatgctgcaggtgaggagagagaattcctcctcaatggccacaggggtgccgggctgggctctcatgcgctgtggagaaacagtgtgagttcagcaggccgctgtgcagcgggcagggcgggggctactgtgagaggcgaggctgacccgaggtggcctcaggagcccagccttacctcacagaactcctgggtcagctgctccaccactggctccatggagtcacggatgcccagcagcagggctgagcgggtgagcttcttgtgggctttccagagcagggagtagtctcccaaggacaggtccgggtagttcctagacaccagcttgtctgcaggaggagttgggggctggagggtgggaactgatgaaggcagctgagggcctgaccttcttcggcctccccaacccctgctttctccccaccagatatgcccccccaagagcttccagggacctggattggggatgccccaaaggtggctcacacttgaggctgaggtgggaggatcatttgagactaggaatttaagaccagcctgggcagcatagcaagaacccatctcttaaaaaaaaatttttttaagaaagaaaaaatgcccccagcccttacaggtaagtggctcaggtctgccagcaaagtctgcccactttttgaccatggcttcctcaatggtcctcttggagttcagcaccaccacatctgggagacagccaaagcagcgtcagcggagagaggaccctctccgtcacctccgccccctcctatggtgagggccagagcgagatcagcctctcaccttgcagcccaaggtggagcctgtagatgggcccgaatttctgagtcaggccaagcagatagattgggaggtcgggctgcagcaagtgcaagaagcccggggcaagaggcgggaggtggaggctccggagcttccaccagttccacagcaggcgggcgccagccagcaggggcagcagcagcagcaggcccaggagcagcatggcgagacgcccgtcagggccctgaggtgccacttatagctcaagagccccagccatccctcctgctgtgtagactgttttggggcctcccttgaccccaccttcaggtaccctcccaccgacccgcccacagagtggcccttttctggaatgacaccagtctcattggccttgggacgtccgtatttcaaaaaaattgatcacccatcaagaagcaaggaagggaaatgcaaccctgacctttttcctgcatccagagtcagctttctggttccacatcaactgtgcaggcaatagtgtccgcccccacctgggccctctccctctgccaccccaccgtgggccagtttactggcatgatgtttgtctcagagagaaaatggcagtccctgcctaataggccttcctgaatcgcctgaagaacaaaatgtgatttgtgtgggttgtttgttagtttaagctacagatagagtaatacagtttaagcctggtttgcctggggcattccagtatatacaggtatcccagtgtgattgttattagtgcctcccttcactcacaaaagtgcccagaagacaaaggaggaagtggtttcccgctgcggagtaatagcatgtaccagacactgctctaagtgctttgtgggcactcactcaactcttcacagccatgctctatatgcaacacgggtattgttcgcatgttgtggagggcaggattccagcctggaaatctagctgtcgaatatgtacctttagccaccaggagcacctttctttggttgaaaggaaaacagcccaccttgagctggtttgagataaaaaataagaattggggaatttcacagaactcaggaaaaagaagcagaggaggggaccccactggtcttagaaagtcaaggatagggaacagaaaaagccccggagacgggcggtttcctcgctctgttcctctctcctctttcttctctctgcagtcaagtttcttgtgtttccaggcacaggcagaacatgactgccctcaggactacagtccacaggttctactccagccagggaaagtatggattcccagcacaactgggcatgcccccctcaaagtccaaagtccccaggaaggggctggatagccacagctggatcaggatcaagggtccagccctatttggggaactgaagccataaggggtgggggtcccactggactgacactcagagaccacttttgtgggtaaggaggcagtttggggatttgggaagaggccatgccaaagaggagtggcagggttcagtgagaggccagggcctcctggatggtacctgagaggtcagaggcgacccagccccataccttcccccccatttctggctctgtgccagaccctcggaccagtgggggtctctctcccctcagagcttttccagactgtgctactgcagagccagagtcaagaccctggctgtgccacccactacattggcgagttcgctgctgctgaatccatgatcaggactgagagggagaaaacaggattgggatttctggggttgggcaatgacagctactgccttcttcatggttgacctcccagaccgggccatgtcttgctgcaactgaatccctggctccggaaaatgggcttatgccaccaccatgctgagcagctactgggagaaagatctgatgagcaaccatagggccatgtatgcaagagcctcaggaaacctctgccacagtgggaaaggcccaaacttctcaaagttacgtgggataagacagtgctcatcggaaaggagcgcacctggaaggctgacgtgcttactacttgtctcaccatctccatctcttccaccacttccaaatccaaactccgaatgtggtcaattacatgcaatgtccccaaaggtaccctgtcctgcccccggcctctgggcctttgtatattctccttctgccccagatgccctcatctacccctgctctttgcctggctccttctcagtcttcagagccccacttggaggccacctgctccaggaagccttccctgtccctgcctggcaatgcccctgacttggttagatgccccacaggaccacactgctccctgacatcacatctttcacagagggtggggactgcccgtcctcttatctgtctccccagcgatgagccctggagtgagcagctgtatctctggcacctggcacagggcatggcatgaagtgaaagattcccgaatttctgtcgaatgactggatggcaggctgctgaactgtcatgacctctacggaaactgatctcaccaaacttctttggacagacgcggagtcatctctgaagaccccaggtgtgccactaaatgggggaaagttaggcaggtccggtgggaaggggagaccccaggagaacagcggcttcctcagaggattcacaaacacaccaaagtcagacttttggcttgtttgaaaccagtaactggaagaagacactgccggacctgaggattgcacaactccgggaaagtcacctcattccactgataacagaaccaagcgtcagcaggctttcaacagcccggaactcagctaaaatctgcagacctcagaaccgccagcagcacgaggacagagtcggggaggtgtagctggacaacagctcatgaggcagaagagctgtgtcacaggtgtcagctgagcacaagccctgtctgaggccgtggtgactggcgacagccgggcagtggagggccttggaagctgaagggtggtcttggcatggactctggtccttggggtgcaggctcttgggtcccagttctgctcggggtggtcctgtgaagcactagactcctagcgggtcatctgggaggttctagcagagctgaacagcccaagggtcatcagggctcagagagtctaaggttatgtcaacctggcctgcccagaactgcatcgggcaggggcactgctctcagccctagcaacacacactgacacttcgctgccaacactgacactttgctgccaaaagcctttaatatgccctggtcccaggctgtgttcatgaaagcggacacagcagtgcttccagcttcatggttcccaggttcaggttcctcccagcggaggtgggagggcagccctcacacctggcacccctgagtgccatactcctggaggaagtcgttgagctgggcacaggctgcccgctggcgggtgctccggcacaggcgttcagagggcatctcctcgatccagctattcgagtccagcaggtactgggggctgcagggggcaaaggggcagtcagcagggctcgggaggatggcaggtggaaacggagagcacaggcatctggcttctgaggggcaaggcctaggtggcgaggcatggggaggacaagagactgaggggaccagatgactcactgtccctcgaggtcataggtggccccatccagacccatgatcaaatattctttcccaggttccaagcgaaggcggcaggaggctcgaaccaggaagttgcgcatctgattagcagcggccttgacatccttggctgcggggatgacgtgcgcaaaagtggtcagaggggaagagaaggtgcagggtgagcccaggctggggactctgtgtagatcctctcattccaccttcgccacccccatggagaggtgccactgcctccctatttatggccaagcccaaggcttctgacagcccaaggggattttcacacttccagatggtcaggtcctcggccacacctcagcctccctgtctccccccagccctgcccgcctctccggtttgcttcatactgaagtgcaggacttgggtgatcttggtctcaaagaggcggaaagcagctctgctgtcttctcggagaaccttaacctggaagcctaagagggggtgaggagaagggggaaaggtgagttactttgaggctgagagggtaggaagttggtgtcagagcaaacaggctgcgtgcatgacctgtaagaggagcaggctacacccagagagaccaaaacagccggtccccgagggagggtcaggccagggcctcggtgggaagactgaccgtactccacacgggggtagtagcaggcaaacttcatcctgtagccatcctcgtcctgcagaccccgctccagggcgcgacgctggcgagggcacttccctgaagttggggaacccatcagacagtgtggggggggccccggccatcccgcctccactgccccgccccaggccctcagtctcaccctcagcacactggcagacttcagcagaacacaaggtggccaagagtctgctcttacttggtgccccgtaaaacacagaacatctgcgctctggagaacagagaggagttagggcacaggcccctccattctgcctcctcagtcccagggagccccagggctctctgccccctcactaccccggtgtccattgtcccataggagggcacctatgccaaagttctcctgaatttcagggtgtcctgcagtgctcaccggggttgtagtagtcgtacagggttgcgctggccggctgcaccagccccaccggcacttcctgcacagcctcaaagcccacgcactcccgggaggtggggacctggccaagcgtggggaggagagatgagggacccactccctgggccctgcagccccctgtactgggtttccttggcctgtttttgtttgcttcctattggccttctctccagtgtccttcacattctgttaccttcctactcagagaactctcaaagctgctccgcaaggtctctggtgacttcacttcccagagggtgaccttgccccagtcttcactgctccaggccctcagcagagtcttgcatcatggacgtgttctctgtgaaactgtccctaagctaagggttagcttctggaccacccttggttctgacctggtcatttcttacgttccctccttcggaacttccttcctcagagctcccctgtgggggtctcaaccactccctggcttccaccaaaccaatccaggctgatgattcccaaactgaacttgcagctccatccttgcattaggattgtggcaggacctgtaagttctccaaggcactctgcctgcccccaaacccactcgccctcctcgcggcctcatctttgtcatggataccactgggtcctcctttatttgccacaacctaactgcaggttctgtcatcctgcctgaccccccgactcaggtcccaggcctgacccctcctcgtgcccacgcgggcccagtccacacggtgccgtgccagtgtccctcctgagctaggctgctgcaccgtcagctccctatccgggaatcttgttggctctgtgttttctattgtgttcaacccagatgtgtcagccaggcttccccagctgatgggggctggcccctctgcacacactgggtaggggtctccctgacctacaaacagctggctaatgacagccaccacacctttctcacattttctcccagaggttacagtaaatgttccaaaactttttttgaaggccgggcatggtggctctggcctgtaaatccggtactttgaaaggcctaggccagaggatcgcttgaggccgggagttcaagaccagcctgggcaacagagcgagaccctgtctttactaaataaataaataaaaatgttttgagagccgtaagagggttgataactattttagccaaataaggtcgtgaaaagacaaatacaactatcatctatggccaccatcactttgtaaaggaaaatacgctttaatattaaaaaaaagataggaagttcaacaaaaaaacaaaggcagcccctcaagctgaataaaaccagcattaggaaagactccctctcaaaccctgagggtccctgctgactggcatcggtccctgccgcctgcaggtctgccccttactctgctgtgtctcacgggctcacattcttgtccttctctctgatgacatcacaagttctcaagagcaccagccgctgacacagctgtctcctgagaaacctcctaacgcatactcagtaaacccggtgccatcgagtcccttcctgcctcatctctccccactcaccgagtcaaaatacagcaggacgtggggcccctcggtctcaaagtgactcacgtaacggtcagagagggaggtcagctgtggaaaaggggagttggtcacaggccctgcacatgacagggctcagtacctgggacagagggggttgccctgggtggctgaccacaccttctccaggtcagcacgcagggcgtggaatccactcaggagggtgacgtccgcgatggccatgccagacagccccaccttgccgttccgcctgtggagacgtgtgagctgtcgtccaggttctgcctgcgcgggctccagaagcccagccccagcctgggtcctgccctccctcccctggcccagggcagctcccggcgcccaccagatgcacacggtgtagtgcaccctggactcctgctcctccaccaccttgggcgcctccctcctgcggcggttcctccgaccctcaaacagctgcaggggtgtcacgggctgcagaggggcatctgggtcatccttggctggaagctcatcgtactcatagtcctcatagtcctcgtttgcttccactgcacagggaagcattgtgaggagggctgggatggccacccggctccctgcgccagcccctgcctggccccaaggcctcccaacccccacactcactcgtgtactcgacgtggcctttgactgtcacttctatctgtaggtcctggcaggtcgtgttcttcatgtccaggacattgtaggtacgaaggacctggctcagcaaggggcagggagaggacgtgggacatgtgaggccacagacctctctggtgccatacctaagggcatctccctgggctacgggatttgaggccttcagccccttttcctccccgtcactgcacagtccacacacacgagtggcaccacattcgccacaggcgtcaggcgagacagagaggtaaagaagcaggggcctgcccccagaggccaacactccagactgtgctgggaagaggctggactgaaaagctcaggaaaggcttctggccaaggcttgaaggagaagaaagagcttgtcctgtgggccaagaagcagggaaggacaggaaaggcaaggggatctgtgtagacaaggagagctgtctggccggaggggtgggcagaggcccagccatctgagccgtgggcagcggggagtgacttttccccaaggctgatctggctggggcttttggaaggtcagtgtcactgccgtgtggacagtggatcagacaggggagacaggaggtagagagaagttccaggtagggagaaggccgtctcagcacagaatctaggatgcagcaccaagggccacaggcagcaggggagcagaggaggagtcactagggacataaggacaggcttgggagaggggccactaacacggcctctagagtagtggctgggctcctggctgggaggggctcccaccagccagacaagagacacagaatgaagaagggctttgggacatgcctcgtctgaggtgctgtgggagtgggacgagtggggcccatggttcagggaagaggcctgggctgaggagtgggattcggagccaccagcactgaggcgggtaaaggaaacaacaggtacccagagatggggagagcaagcgaaagcaagcagggggaaaaacacccaggacggaagcacgggacaccaaccctgaggtgtctgcctccttccccggaccatgtgcctctgcccacaggcctctcactccacaccctctcctccaccagtgcctggccccaccccttccctggccctcaccttcagggttcctttgctgtttcctcccaccttcacattgatcttgctgcccaaggaaaacttcagcaacagaaaagggaaggcgatgttagaagggcacaagcaaacctgtttttgcggctccagtaacttatctccttcctcaaaacagccccacctcctctccccacctcacatttccacaaagtttataccagcacatgaattatctcacttcagccttctaacgaccctgtagggtgaactctgtgtatgttactctacaagtgagaaaactgaagctcagagctccaggtcacgcagccaggaagtcagtcttcccccgaagaccccaggaagaagtgctgcggggattccacgggtgggaggttggggacggcttctggcctggccacgaggcccaggtgtcctggctacccaggcgagggagtggttcaccagggagtggttcacctgcagctcctcctccaggccgcgaatctggcggttgttcagctgcagcgcgtgggacttgaacccattccggcctgtggagctgagagtcacattgagacccctctcctcagtggtgtgggaggcaatccagtaggcagacagggcatccagggcaatcaccgtgtcctagggaggttgagccaggactcaagcaagcccttggtctgaggactacccacccccgccagagcccggggacggcccctacttgggtactgcggaatcccccttggaagctgccctgacgggtgagccaggccgcagcctggtctgccatctctgctttgccctcgtgaagcaggaggtgcagcagggcgtaggctgtggtttcaatccacagggctggggcctggggcatggggtcggatgggttgcgaggagccggggtgggcgacacggcattgctctgagaaccagtgactgagccccagtacaggttatctgaaagtgaagggagaccacgagtaaacaggaaggcagggagaagagcctggtcccctggcccttagccaccccctgctgggctctcctgagtctcccccaacccacccctgcttataacttcattcctcctctgagtcttcatccagcctctccctctgggcacactcagggatcctaaggtcccctgggcctcaggctcactgccaggagcgcctcacccctcacctccagtctcctgggccattgccatgaggttgttgtgggcaacaccccgcaggtccgcaggggccttggtcagtgtcagggcataggccgtgatggcagctgcgtgggcacccaggagcccagcacttgctttctcccccaaaaatgagcttgcctttgagatggaggcttcctggaagaaaacgggaggagggtcttgggcctggacccctgggttcctgaggaaaaagggagagagctgggggccagcagagggcagaaacgccactgaacttaccactctctgcttcaatggctctgcaccctcatcctggaagacggccagcccatgatgaagggcgatggtcacaaaggctgtgagtgccacagtctcatcattgcccaccaaacccccctagtaaggggagaaaagatgtcaaacaggagggggaaggggcaaagagagtcctccgacaggcgcttctcgggccagccccagcatgcccgcacctgcatgctcctatgtatcactggagagaggtcctggaacgagccgtcagcctgctgctgggacagaagccagttagatgtctcctgcagtttctcaggcgatcctcctacctgctcctgggccaaactcaggaccttcaacacaaaggctgtgagcctggagggcaggaaaggagggttggggataaggacttgcttctcattatgcccacgcccccaggtgcctggttatccaccctcccatcataccagctctgtcccacccctgccccagccctgaccccctcagaaccctggaaccactctcccaagctcaccaggtgctgctgccccgtgacaaccaagccgcataggaaccatccgccttccgaaactgctggatccgcatgtagccttggagaggagaggtggccgctcaggtgacactcacccttctgctgtttgagcccaaggccatgctccccatcctcatcaggggccccctttctttccctctgtagcctcctgggctgtccatcttccagtaactgtcctttcctggcccccctcctgcttgcccttgcacccagaacctttctggatcagatccacggcgtggtccttggtctcgggaggcagtgtgctccactgctctgtcttgtccaggtagcgggaagcagccagtgtcggagccaagtagatcatggtttgctccccacagcctcgaggaagcctcaagagggaggccacgcctcctggtgacaaggccccctcagagcctaaagtgtccaatggatctgaggctacatgggagggagagggtggaggtctgaggactctgtgtcagaggctcacggggagtgggaccaagcagggatccacaggtcccacatgaatccgaaggtggccactgggaagggactaaagggcactcccacctgtaaccctgacgtagctgttaaagtccccatcagggatcatattgggatcagagttgccaggtatttccaaggtccggcctcggtggtctggggaaatgggggaagttggcagcctgtcctgctgtccacatcccccaccacctgtacccacttaggaaaccaatggctggaggtagagggtcactcacccaaggggttgagttcatagaccagctcctctctatggatggccccttccttctgtctcagggaaaacatggttgtgaggtcacacaggactacagcctgccctgctagcgcagactcccccagaactttgagtttcaactccagggacagagttggatcagaattgtagaagatgggaacagaccaaggcattggttcgggtgttgggcccctggcctggccagcagagagagtgctgagggtggaggacaaagctaggggcccggggacttatattcaggggtgctccattcacctcaatctgcagaaccttggacaccgcatctcccacagggaattcgaaggaccctcgagccaccaccttcagagacacagcggcggctgccgtgggcaccacagagaaggcaacaggccgggcagagcccgcaggcaccagcacctgctgggccagccctccgcccccagccaggcacagcccctccactggggacacgtggacgctcacctgagggcaggaaaacgaggatggccagagtcctggcccggttagcctccccacccctcactgggccctggctcccccaactcctgtatgctcaggctcccatggggcctcacagtcaggtttttatccaggtagttatagaggacaggccgcagctccagctgctcaaagcggcggacagacatgggcaggcggaggtgcaggtggaactcgcggaacacccggagctggactggggtggccacacataggcctgagggaaaggaagcgtgggcacaggggcagagatcagaggggccatcaaagcttcagggccacaggagggaggggtgggggtgacccagctctgtctcagtccgcctctgccctctggcccacgccagctgcacgctggcacagacctccccagatcactggaccctcttcctacactaagagcaaagggaacagggagctggggtacagggaaatggaagcggggtcacctgaggcccagacagggtgacatcacctttggttttggacaggctcaggccatggatctcccacgtggtcagagagtcggggagccacagtgtcaatctgtgtagggaaaggcagagaaggcccgtctaccccggctggccccgagacacagcacagagaaaaggccgggccggcacacactctcacatttgaaagcggtccactgtttccactctccagagccagttctctgggaagaagctgcgcacgggaatgtcatcctcatcaatcaggtcctcctcctgcaggatctccagggctgggggaccacggtggacgggagtgaggaggggaccgttctgcctttccaagcgccgccacctgtgccctagccccacccagcccctcacctcgttggaggcccgcctggcccttgtccctgctcttcttgcgcagactctcagcaaattggcagcaggacaggaagggctcccggcagtccggctgctgcacgcgggctgcccgctgctcgcaggaacgcatcatgggcagacgtgtcaccccatcctggcagcagcgcttggctgtcggggaagcatactgacccactgcagggccaggtgggggtgagcatgagaggacaaaaaggacatacacctcagcccccgccccgaccccttgagaccagcaacataagagaggctgctggagagagctgcccaccttccactcgtaatcccggaattcggatctctggccccaaataccacacgtgggttcagcaaggagccgaggggcagagaggcagacccccaacccggatcccaggtggagagcccaagctactgcctaggcacccgcaactcacatttctcattaatcgccttttggaagttcacgtttctctttttccgggttgtcttctccttgggacagcttagtcctggtagagagaaaggctgcagtccagccgtcaggcactcggcctcctcccctcctccccttcccctgcccagcccttcctgcccggactcttccagctggtcccctcaggcccttcctccttccttatcttcccgccacccactccccttccttctctgttctcactctttctggataaggtccactggtctccatcagaaaaggccaggcccgctgcctggaacacctgaagggcactgtccccacccccaggaccacagccgaggtcatagctgttcatagcttcaaagacctgcaagaaaggcaggaatgctaggagccaagtgtggctgaggggcaggactgagcactcggcacaggtgagagggcagcacatggggggataggaaaggatacagagccaggagatggagaccacagggccaagtggggaagagactgtggggagcctcagtgggatccaggggctgcgcccaaggctcagggaagcagggggatgagccatggaggggtgagagagctgtggagagggtctggacaaaccttgcccatgttgaggggcttgtgggacttgctgcctgcagcatacagagctgtgtccaaggctcccagcgccaccagggctagggagtcggtttctaagtggagcttcacggactccccgttccggtactgcttggcaccgtccacgctgagctccagctggcaggggcggcaggtgggggcggtcagagtgggagagcttccttcagtcccggtatcctcactgcccccaagctaaatccatgccctgttggcaatcaccctgtcctcaaccccctcggcacaagtgccatctctcctgaccccggtcaccttgccctcgcaggccccagcctggacatccactcgcagggagttggccactgggtggtctccatggtagtagaaggccacaaagtagaaggagggtgccaggtgatggtccacaaacaccgagaccgaggtcagggtcctcttgggctctcgattcatgaacacgatctgccctcgggataggatctgggccaagaatgggagggacaagagtggttgcctcttcatgggacagcctcagccttgaacccccccagccccacccagagggctcttccctgcaccccagccctccttgactccccagctcatgcacaccatgtagtagtaatgagaaaaggtggccccactgcccacggctcgcaagttcaggttcagagtgtccccaacacgaggaggtcgagaatccggccgctcaatagacagaaacccggggcctcctgaaggtggggctgccacagtgagcctggctatcgctggatgtggggagcctgcagatacctggagagggggtcaggtgcgaatagggtagtagctcagagccaagtaccccaccttccccccaagtcaggccatggatccttgggaccccagctcaccctcctccccttcccccaccatctcccagggggccgaggaatcctactgagagctgcagctctgagatggtctgagggataattattggaatgctgacttggccgctcccgtctgtgttttgctgaatgtcctggacttcaggaacagacccaggagaagacaccgtggcagaaactttgacaggaatgccagaagctggggagcctgacatctcacggaccaaggcctaggcaggtaaaggagggcaggcaaaagagagtggtcagaccctgagccctcctaactaccacatcctccctactcatccttcccctctggaagaaacctgcagcaggaagggggccccaggcacaaggtgtcgcttggtcttgctaagatccaaggagaagggagatgacacaaaataccaggatgtgagctctgcctcctccatctccccacctgcaagacaaaggacagagagaggtgggggacagagcccaagaagagagggacaggaggacaagtggggagtggcttgagtggttccctcccacaagacagtgagctcccagggcacaggctgccgtattcctgtctgtgttgggaaaaggacttgtggggtgcctgtataaactggccataaaaatatgggacaataagttgtggaaagccacaagaggcctctgaggagaaaagcctcctaattgccatgctcagagcgagacctgctctctcttatctgtaaacactgtattcaaggagaaagaccctcctttgaagcattggaatgtggacagacgtgcaggctcctagttaagcccactcccactagctactctccgataagttaaagatatgctgtttgagcacaaaggagattcatttaaagcgcttctgctgtagattatgcctgtgacgcactgctaccctttcactgttttgccctgaacatctgcttcttagatctaagttattgtactcaataaatagtgtggagaccagagctctgagccttttgcagcctccattttgcaattggccccctggcctccactctttatgaactcttaacctgtctcttctcattcctttgtcaccaccagacttcaggtaccctacaggtggtgttgaggctggtccccaacattctggcgcccaacgtggggcccaaaagaatctggtgaggaaacgctcaagcatgtgaaacagaggaccaacgaacaaaggactcccaaggacataaaagttttaacctctacaggtaagcggggcgcccagagaaagctagggacacaatgggaaaaactgaaagtaagtacaccacgtatttgagcttcctacggcagctcttcaagcatgcatggtggggtaaaagttgatacggaaaatcttatggatttgtttcatgctatggaacaattttgcccttggttcccaaaacaggaaactttgaaattaaaacattaagaaggagttggaaaggaccttaaaagagcatatagagaaggaaaggaaattcctttgcctgtttggtcgctttggtcattggtgcatgcagcactggagccttttcagacagataatgaggctgagtcagaggaggagagagaggagtttgataatcagaactctgaaccacctctaccgagtactaacaaaaaggagagtctgaagatgatttatgccaatctccccagtctccctaaacctactcaaaaaattgttcagcccacggttcctgtagaggaatgtccagaatggccacctcctcctcagccgagtgggtgcagggggagggagcccgagacttggctcaccgtgcccattattgcccgacccacagttcattatggagatggggcaattcaggttcaccctacagttattacagtgaaggagcaatttcccttaaaatggatgacccggcgccccgtctgggttgaacagtggccgctccctaaggaaaagttgggggtgctttataaaataaactactaaaaaaaggatatatttcacccactttctctccttggaattccccagtatttgtaattaagaaaaagtccggtagatggcgtcaacgctgtaattcaaccgatgggagccttacaacctgggctcccatcccccactgtgctccctaaagactgaccgcttgttattatagatttaaaagactgcttttttacaattcctttagcagaggcagatttcaaaaaatttgcctttaccattcctgccgttaataacaaaaaacctgcagccaaatatcattggaaagttttgccccagggtatgttaaatagtcccacagtttgtcaaacttttgtaggcagaactatccagcctgttagagatcagtttccagatttgtgcagcaaaaagtagagaccaacttattcaatattattaatctttgcaaaagacaattacaaatgctgaattacttatagcacctgacaaaattcaaacaaccactccttttcagtatttgaaaatacaagtacaggatagagccattaagcctcaaaaggttcaaattagaagagattctttcaaaaccttaaataattttcaaaaattgttagaagatattaattggatttggcccaatttagcaattcctacttatgctatgtctaatctcttctcaatattgaggggaaataccaacttacgcagtaacagagaactaacacccgaggccatgaaagagttatcagtaattgaaaacaaaattcagcaagcccaggtcagtaggattgactcagacttgcctttataattcattgtgttccctacttcacactaaccacacaataatgggggttattgttcaaaatgatgatttagttaaatggtcctttttgccacataataccataaaagcacttacagtatacttaaatcagatggcaattctaattggacaggctcatatatgaattattaaactttgtggcactgagcccaataaaaattatagttccaataaataaaaatcaggttaaacaggcatttattaactcagttacatgacagattaatttaacaaaatttgttggatgtattaataatcattatcctaaaaacttttcaattcttaaaattaactacataggttcttccaaaaattacttgtgatgcccctttggaaggagccatagctgtttttactggtgggtctggtaaacatgaaaaagcaacagtctggtggagaccacataatccaatcacttgatctgaatttactaacattcagagagctaaggttattctgtgtatttatttaaaaactattacagccttaagtttgctctggagcccactctgtgtggtctttttcttcaacttcaacaattactagaccaaggtacacatcctacttttattacacacattcgagcccacagctctctgcctggcccattggcttacggcaataatcaagcagaccttcaggttatgacatcactgcttgaccaagccacccaatcacatcgattattccaccaaaattggagaaacttatctaaataatttcaacttacacagaggctggctaaacaaattatcccacaatgcccagattaccagctcacaggcacataccctccttcaataggtgttaaccgtaaagaattggaacctagtcagttctggcaaacagatgttaaacacatccctaaattttaaaaactaaaatatgtacatatatccattgttaccaacactcatctaattattacacatttaaaaaaataaaagtaaaaaaaagactaagacaaaaatcaaaaaaatacaaaaaaagtaaaaaaatttaaaaagttataaaaatgtacctttagtaaaaaaattataaaacataaaaagttaagacatgttaaaaattgtctgtaaaagtcataaaaaaagttataaaaaatttatacaaaaaaggttgtttaattttgttttaaagatctaaacaagttttaaaatgataattgtaaaaaattccgtgtgtaaacgtatttactaaagttaaaaagatatcatccagttttctataaactaaacattaaaataaaacacaagtttttcttaaaacactaacctgctctttaaaaattgtaaaaagtctcttaacacagacgccactcctaaaatttccagtaccagcctaaagactacatcctcatcaaaggataaaaaattaaaaaataaaaaaaaatttgaaccagcctaaaaaagaccctacaggaactacagcctcaacaatgcgacttccacaaacaacacaggcctcagacattatactaaaaaaacaaaagtctaagccaaataatttattcatttttaattctctcactttgcctactacctatacctgctacactgtattaagctcgtatcttaaatccgcctttcttctgccctgttactttaacaaacacccccttctcagcttctaataacataactgcttagctagaataaattaacatacccccagtggggttcctcattaataacatatagtaaactaagatgccaagtaacactacaggtcactcttttactaaaaaaaaaagttactaattatactcatgtttgtcttctgttatttactaatcctagaatacaaagccaaaataaaaacagtgacctcctcgcctaacaaacctgtggctacaacagcccaaaattatacctattgggcatgtgtcccattcctgcctttaattaggcctgtcacatggttaaaacccccagttgaagtttatgttaataatagcgtttggatccctaagcctacaaatactcatgggccctctcacccaaaggaaaaaaaaaaaagttaataaatgtgtccataggttatcagttcccccctctttacataaggccaactatcggttgcctaaaaggctaccgacaacattgactagttaaaattccaggtcataatcaaagaccagtatcctatcatttattttctggatggagcccggatcattcacagagttcaattcaattaacagtttaagcccccaaaaaagaggtgccaacaaccttaacaatggtcaaataatttaaaaatattaattaaaaaaaattacatctctgatcacactatggtactacaaaataattcctatgaaattgtcattaattggtcccctgaggggacctttacagttaattgtacccatcaaaataataaatacaagacaaaactaaaacagaaactatactatcaaaaaggtaacactacttacactgaaaaacgtgctcattttcccataatttggaccaattttagtacagctggcccacatcccaaaataattaatccaataataggccctaaacactccaaattatgaaagttaataatggcccaatctcatatttaagtttagaaaaaaatatattatctttaaaaaaaaaaggttaaaaacttcaatttgcgtatcagttttcttccaacaaaacagtgcccattcagagttgtgtcaaccctccttttatgttaatggtcaaaaatattgacattcgacctaattctcaaactattacttgtcaaaactgtcaccttttcacctgtattaattccacgttcggtgtaaaaacatctgtgttactgataaaaactaagaaaggagtttggatactggtttccctcaatagaccttagaaagcctctccttccattcatattgtcacaaaaatgttttaaaaaaaagtgtttaccaaaacaaagagatttatttttacccttataacagtcttatgggccttattgcagtcacagctactgctgcggctgctggaattgctttacactcctctgttcaaactacaaaatatataaatagttaacaaaaaattcctcaaaattgtggaattctcagacccaaatagaccaacaattgacaaatcaaacaaatgatcttagacagactgttatttaaatggaagatcgtacaataaacttaaaacatcaattagaagtacaatgtaattgaaatacttccaatttctacataactccccattcgtataatactactaaacatcatttttaaaaagttagacatcatctaaaagaaaaaaataaaaatttaacattaaatataaccaaattttaaaaaaacaggtttttaaagcatctcaggctcatttaaccctcctgcctgagactgacattctcattggagctactgacggactttcaaacataaatcctcttaaacagattaagaccattaaatgatcaactattacaaattttactttaatgtgtatctgtttatgctgtttacttttagtctacagatgcaaaagacacttctgaaaacagaccaaacaccacaaataagccataatagcaatagcggttaaaaaaaaaaaaagggaggggggcatgttgggaaaaggacttgtggggtgcctgtataaactggccataaaaatatgagacaataaattgtggaaagccacaagaggcctctgagaagaaaagcctcctaattgccatcatgttcccatgctcagagtgagaccccctgtcttatctgtaaacactgtgttcaaggagaaagaccctcctttgaagcattggacagacatgcagtctcctagctaagcccacttccaccagctactctccgataatttaaagacatgctgtttgagcacaaaggagattcatttaaaactctattgctatagattacgcctatgacccactgcctccctttcactgtttctccctgaacatctgcttcttagatctgagtgactgtactcaaaaaatagtgtggagaccagagctctgagccttttgcagcctccattttgcaattggccccctggcccccactctttatgaactcttaacctgtctcttctcattcctgtgtcaccaatggacttcaggaaccctacgggtggcgttgaggctggtccccaacatgtctgtgcatgctgaggcctagcacggggcattgaacaacacatgtccactggaggagtgaaggaatgagcagaacgagcaaagaaataaataaactcagccagggaaaagggccgagtcacagagacagagttggagagaaaccaggtctcctgggtgtttcctggttttgagtctgagatgagatgtgagaagtggggtggtgttggtgccggaggacagagggttagctcagaggtcagaggcaagggtctggggttacaataagggaaagtcacccacctggatactcaatgatggctgcagcaacgtagaggcgcagcccctggaggtcagtaatgcccatattcagcttctccagggcgtcctggaactctgcctttgagagggaaatgtggctctgtccattcaccagctggggcatagaaagaaacaggacatagggtgagactgagtctcccacctcacctcccttgccccttcccctccccagcccctattctccttcctaccttggtctgactctccagcccccgaaagaaagtcttcttaccatcctcatctaggagcccaaagcgcacatatgccaccccctgcactggcttcccatagatgtacctgtcgtggcagagagaagagggtgggccaagggctggggggaataatggcccgagggcagggaagcaggagcccattcatactgagtagggagcaggacccggtgctggtgggcagaggtggggagggaggtattacctggcctggatgtctaactgcatttcatcaagatggcctggcaccgtcaggatgtagggctttccaggggtgatcttcacctcaaagttgggaaggactgacccagggtgaagggataggcaggtcagactccagctcaaagactcccctctgctcagggctgtggcacccatatctccctgccctgagctgctcccagtacctctccttccacccttatttccttcaggaaagcagctgcctgtccctccagtttccagctctcaccatatttcttcacctcaaactgggtgctgctgttggattccaggccatctgagaatcgggctgagatcttccaggtccctggcctgagaatggacaaggaaggggctcagcccatctgtacagtggggcacggagagccagcagcctgcttccctgggaagaggactgtgggggttaaccagaggctcaggaggctgagggtcagggcatctggggacgtgcctctgtgtgggaggtggagagcctaacaggaattggggtggtgtagcttgggggcagcccccacattgggagcgctcactctgagatgtctgggatcacaaagtcatcctggaagatggacgagggcatgtacacctccttcttccgcacgcggaggccgtgagagttctgcaaggggagaagtgctcacaggcaggaggtcacatcagtggccaggatcaggaaggccagaggtcggggactcacctccaccatgactgtgatggtgtcagtgctcgggcgcatcttctgatccagagcaaagacccggtaccgaactgggagtggaggaggagagaggtgagcaggggtccatgtgcaaggggagggtgggtcaaactccacagagggagcaggggacaaatgtttcctaagcaccccttctgtgtggcactttctttcaggttatctcacttagggggcaccaaactcatcctgagagggctcggagggggttaaaggttgaggccctggggctgagactcaccccgctggccagggttgtaaatgggctggtccgtctgcaaaaagaggtgcccccggcgagaggagaagagcaggttgataccctggatgtttgtcgttctggacagagagtcctttagccatggcgaatgggccaccagctggacctcagggcctctgaggagttgatggaggccacagctcttcgcatctttcaagggcacctgtcaggagagggagagggagagggagcgggtcacagagcaagagacagctgaccaaaaaggacagagaccaagggagaaacgtggaaggagaatgccagggtgggaagacaggaggggaggaggccagtgggaagatgatgacacttacaagacagatgggaacagggcaggaggcccccacaagcagcaggagggcatggggtctggttacctggagactgaggagtgcgaagtctctttctgagctaagggtgaagtccacctttggggagcaggggacattattacgagatgggtttctcaggaacactgatcctttcactacctgtcctcggggcacatcctggagctgcacccccaccgatagggggacccccagatgaaccacagaaggagagaacaagagcaacctggggagaacagacaggatcagcagtcagacttcgctctgacacctccacccctgctctccctcactcctgaatcgggtcccgatgccagccctgccccaatccaagcacccagcatcccgcctccaggacctgggcttctgcagagataaggtgaagaagctggatgcccagatcagcccccagagcagcctcatggctggaggatccaagagaggttagatccgtctgtctgtctgctaccttctggccaagctaggcctcggggcagagttgactctggaccttgctcctcccccagcccagctaagctgggaaaccacgtgacagccaagaagtgcaactggcctcaggcccagagttgtgggggcaccccggacacctgggtgtccatgggaaactctgaatcttggcccagaaataaccctgtccttccccgttaactcctctcattccagtgcctgagcacctccccctaccaggtatatctgtatcagggtataggtgcacacaagctcatgtatacctgggcgtacaagggcccaacatggcccacgagtacaggatatttaaaggccctcacaaaacaatgacaggcttctaagacacttgtctcttactttcattccaacacaaattgaactatactaggcttttgcttttttaggccctaacagaaattccgtggtttaggagattaggtacaccctcaccactccacagggagaatggcctgaacgtcagagtgaacccctgacccctttcctctctgaatgaggcaaagctcagacttcacctctacccctaaacaaggcacccaaacacacgtcacagtaaataaaggacatccagaaaatatcacaggcagaggtactttatttggcaattttaacatgacacgtagagaaaagaaccctgccctccttcaccagcctccccagaaatcccaccttcctatttcaagacagagtaataacagcaccattttacacgaaagggaacagccacagccttggcaccatttctggttccactttccatggaagggcagagaagcattgctcaaaccccaccactgggtcagaaaccaggcaaacagcagcagtcacatctgaccttttgcacacacgagagcccgacactcatcctggctcccaagccttcccaaggtgaccctgtctcagccaccatcatgcagctcttctagtcccctcccggcccactctgaggagctgagcaatgatgagcagaatcttcatgtctctggcaggcggaggagggttcctgaagtggtagagatgctgtgcaggagaaagacaaggctggagccagacgcctaggctcaagctgtgaggagaacttagaacttgggaaggggtgctcccgggttccagagaagaatgagagccactggccttcactaggaaactaagcatgagctgggaggaaatcccactttgggtcattgctccataatctgccagaggccagggaaagactcaccagtccactagctgggccccaatgaggtcgtgcacatggtaggtgaggccaagccgcaccacgacaggcgcccgccggcccaggagctctgataggagcagttcccggtactttgccttccggaccatgctaaggacagcctggcgccctagagaagtggcacaggaaaggggaaaggtgaataaggcctagaggcctgaggagccaccaaaaggtgaggggctgcaggcttgagctgcagatgggatacctttaacaaagtacttgatgaatctcccagctccaggcacagctagccaccagctcccagcatctcggacggtgaggactccagcattcaccagatgcctgagggcagtgggaagccagcagagatgagggctgggctctgagaaccatctctcctcctcatccattaatgtttacacaagtctccagaaacacgggcaaccatgcaagagagactggataacaaaatcccagcctggggtggttctgtgctcgcaccaactgcctctgttggtgcagttgcttgttccaggccccctacctggactgccctccctccactttttcttttcctgctactattactggttcagttaaatagcttctcttccctgaccacatgtcctgacacacattcggtcttaggaccgaggagaggaatcagagtcttctgcgctcctgccactgcctaggcagactgcgccatggctcccaccacatctctctgagagtgtgtctgcccatgtgagatcagtgctatagtttttcaaatgctttcacatattccatgggttacaaagtaggaggcctgagccagatacagcctctcaaaattagatttttatttagctcctgcccagttgttttttagctttgggttttttttgttttaatgtgaatgtttaggggtatcccagctcctaccattctctatcctcttagtcccagtatgattaacatcaagcttttacagttcctgccaggcccctgtgtgcttttgataagccaccaagaactgaattctatttcagggctctttctaaggcccaggtaagataggcctcctctcttgtggggaggaatacaaacttgggtcattttattaaaaagaagagtcagctttttggcagcttttctggcaggttcaccaaaaaaacaggaggacaggctggatggaactggagggaggcagggaagcaccagatgcctgactttggttggttccacaagtctcacgtgatttctgagtccctgaagccaaaggtctgtgtcatttggtcctgctggaaactaaggtccccacaggctggaagtactgaagctagaaatttctgcactgccccagcatacggtcggccatcacaggccttgaggacctacaagcagagatgagagacatggtccatccccaccctcactctctaccaacctccacccccaggacagcatttctcttcctgtcttacctcttgctcagatctttccacctctcatacccttcttcttcctcctcctcttcatcctcctccccctcttcctccccccctcctcctccccctccttccttcctcctcctccccctcctctccccccctctttaccctctcactcctccctctttccctcctgtctctctccctcatattactatttaccagggccctgtgccctctccatgggatgtgggggcagggaaattctttcttttgtttttatttctgtttcccaacttccctgtctcccccaacctgtgccctccccccagcacccctgacgcacacagtcacatactctggtcctgtagtcctcagtgaagataattccatgggcatccaagtcgaagcccagctggacgattctgatctccccctgctcttgaagctccttctgtctccacagagaagagagtgaaaagaggcgtatcagggtaagatgctctgctatactctgggcgctctcaggcagggagattttgtttgccaatatgggggcattttctcttagtaaaggaaaaactgtgtgagaaaataatcaagcaaatgaccaagcagccttttccaactagctacccacattctcatccacctgccttatatatggtctatcaaagagtcaatataatttctaagaccaggcactaagataaaatagtgattaagatgcaggctgtggcttcaaaacattaacagtctaaattctgggtagggtaaggtggggaggagtatgggattcaatgtttaaaacaaataaaaataaaccaggacttctgtttacgagaatacagcaagaactaatccacctgttgaaaattaactaaaatcctggataaaaatgttattttaaaattgtttaagaccaggtacagtggctcatgcctgtaattcagcattttgggaggctgaggtagcaggatcaattgaggacaggagttcgagaccagtctgggcaacacagtgagacccccccacccgccacatctctacaaaaaatgtaaaaacagccaggcgtgggggcagacacctatggtcctagctacttgggagactaaggcaagaggatcacttgacccaggagtttgaggctgcagtaagatatgattgcaactgggcaacacagtgagaccccatctcttaaaaaaaattgtttagacactaaagagctcacaggataacaggaattaccactaatataacatctaagtaggccgggcgagatggctcaagcctgtaatcccggcactttgggaggctgacgtgggtggatcacctgaggtcaggagttcaatatcagcctgaccaatatggtaaaaccccgtctctactaaaactacaaaaattagccgggcgtggtgatgtgtgcctgtagtcccagctactcaggaggctgacacaggagaactgcttgaacccagaaagttgctgtgagccgagatcatgccactgcgctccagcctgggtgacagagtgagactctaactcaaaaaataaaaataaaaataactggggccgggcacggtggctcatgcctgtaatcccagcactttgggacgctaagggtggatcacttgaggtcagaagttcaagttcaagaccagcctggccaacatgatgaaacccggtctccattaaaaatacaaaaataggccagatgcggtggctcatgcctgtaatcccagcactttggcaggctgagacgggtggatcacgaggtccggagatcaagaccatcctggctaacacggtgaaaccccatctctactaaaaatacaaaaaaaaaaacaattagccaggcatagtggcgggcacctgtagtcccagctactcgggaggctgaggcgggagaatgggtgaacccaggaggcagagcttgcagtaagccaagatcatgccactgaactccagcctgggtgacagagcgagactccgtctcaaaaaaaaaaaaaaaaattagctgggcgtggtgtcaggtgcctgtaatgccagctacttgggaggctgaggcaggagaatcacttgaactcaggaggcagaggttgcagtgagccaagatcataccactgcactccagcttggtgacagggtaagacactgtctcaaaaaaaaaaaagtaattggaacatggagggcatttattaatctaggcaaatctgcccagaacattttcaaaagtaactgggcgcataaggaaacaaaactcaaagagagaataaaaacaaaccccaaaagacaagtaatagtggaattatcctttccacggtctccctctgatgccgagccgaagctggactgtactgctgccatctcagctcactgcaacctccctgcctgactctcctgcctcagcctgccgagtgcctgcgattgcaggcgcgcgccgccacgcctgactggttttcgtattttgttagtggagacggggtttcgctgtgttggccgggctggtctccagctcctaaccgcgagtgatccaccagcctcggcctccggaggtgccgcgattgcagacggtgtctggttcactcagtgctcaatggtgcccaggctggagtgcagtggcgggatctcggcttgctacaacctccacctcccagccgcctgccttggcctcccaaagtgcccagagtgcagcctctgcccggccgccaccccgtctgggaagtgaggggcgtctctgcctggccgcccatcgtctgggatgtgaggagcccctctgcctggctgcccagtctggaaagtgaggagcgtctctgcccggccgccatcccatctaggaagtgaggagcgtctctgcccggccgctcatcgtctgagatgtggggagcgcctttgccccgccgccccgtctgggatgtgaggagcgcctctgcccggccgcgaccccgtctgggaggtgaggagggtctctgcccagcctccccgtctgagaagggaggagaccctccgcccggcagccgccccgtctgagaagtgaggagcatctccgcccggcagccgccccctccaggagggaggtgggggggtcagccccctgcccggccagccaccccgtccgggaggtgaggggcgcccctgcccagccacccctactgggaagtgaggagcccctctgcccggccagccgccctgtccgggagggaggtgggggggtcagccccccacgcagccagccgccccgtccgggagggaggtggggggtcagccccccacccggccagccgccccgtctgggagggaggtggtggggtcagccccccccgcccggccagccgcctcgtccgggaggtgaggggcgcctctgcccggccgcccctactgggaagtgaggagcccctctgcccggccagccgccccgtccgggagggaggtgggggggtcagccccccgcccggccagccgccctgtccgggaggtgaggggcgcctctgcccggccgcccctgctgggaagtgaggagcccctctgcccggccaccaccccgtctgggaggtgtgcccaacagctcattgagaacgggccacgatgacaatggtggttttgtggactagaaagcgggaaaaggtggggaaaagattgagaaatcggatggttgccgtgtctgtgtggaaagaggtagacatgggagacttttcaaaaaaaaaaaaaaatagtggaattatcaaaaagacaattaaaaaaaaaaaaaacagcactttgggaggccgaggcaggcagatcatctgagtcaggagtttgagaccagcctggccaacagggtgaaaccccatccctataaaaatacaaaattaggccgggtgcggtggatcatgcctgtaatcccagcactttgggaggccgaggagggcagatcacgaggtcaggagatcaagaccattatggccaacatgatgaaacccccatctctactaaaaataccaaaattagctgggcatggtggcgcgtgcctgtagtctcagctaatcaggacagtgaggcaggagaattgcttgaacccaggaggcagaggttgcagtgagttgagatcacaccactgcactccagcctgggcaacagagcgacactccacctcaaaaaaaaaaaaaaaaagggaaaactaaggcaacaatgaccacagcagtcacctcccagggacattctgatcagagacattttgatcagagagggatatatgtgggatactggtcatattctatagtttgacctagggagtggctagataggtatctgctttataaacatcatttaaattatatatgtttatattttcattctgcaacttttaaaggtttttaaaaacaaaagctaacaccaatacattaaaatcaacaaatactccttaaggagtggttccatctggcatgcttcctcacgggagacctagtcagggagactagctcacctcaagtgagtgctagactgccttccttttctttcctcttttcttgaaagatcactattaaccttctacctgctaaatccaatggacagatttcagttctgggtttttttgttgttgttttcatttttttagagacagggtctccctctgtcacccagcctggagtgcagtcgtgcaatcatagctcactgcagcctcaaattcctgggctcaagcactccttctgcctcaacttcccaaacagctagaacaataggtgcacaccaccatgcccagctaagaatttttgtgttttaatttatttatttagtagagatgggatctcagttatttagtaaagatggggtctcactttgttgcccaggctggtctcaaacttttggtttcaagctatactcctgcctcagtctcccaaagtggtgggagtacaggcatgagccaccacactcagcctagatttcagtttatattttactttacctcttccctcttcttagaccactgtcttgaatcacaggttctaatactgccaactacttcactttctcaaaaatctctttactttcacagtaggcctcttcctgggttacttttttttttttttttttgagacaaagtctagctctatcacccagggtggggtgcagcggtgctatctcagctcactgcaacctccgcctccccagctcaagcaatcctcccacctcagcctccccagtagctctataggcgcgtaccaccacgcctggctaatttttgtattttttgtagagatggggttatgtcatgttgcccatgctggtatcaaactcatgagctcaagagatccacccacctcggcctcccaaagtgctgggattacaggtgtgagccaccgcgccggcctctgggttcctcttaactcaggcaagtccctctctgcctctgtcacagattcctcttcttctgctttccctttatgtcagtggatctcaaattttaaggcacacttaaaaagcacttgaggcagttcaaaaatgtagagtcccaaatcccgccccaagagagcgtaattcattaaccttggatgagtcccaggaacctgtattttttttaacaagcagcccatgtaattttgacacaggcataataactcagctcatatattcagtaacactgccttaaatgatggtgtttcccagcattgtggatttgaccctattaacttccactctaaacctggagtccttaaccacggacctcgcaggattagtaaaatatttcccccctaactacacatacaccctatgtatatgtggcaaacgtgcatttttctggagagagatagccatagcttttatcaccttctaaagattacaaaaaggttagaaatcactcctctacccactcttcctactggatctcaccacatcacagaattaaccacttgctattcacacctccatgacttgtaattctattatcactggcccagaattctctccaactctcatatccaactgtctaatacctttgtctttggatgctccacatgcaccatcaactcaacttgtataaaattaaacacattatctgtagtccaacaactaaatgtgctcctaataccaccagccacgcagtcatctggaaagtctgagttgtcctggactcctccctcttcctcactctcctctccctccctactgcactgacctaatttaggccttcaccacttctcagatgcagtatcttcttagctgacctccctgcctcatccactatctccaatacaccattccctctctctatgatattctctaccagcccatcgcctcagtgtaagatggaaacaacactgatgtacaaggcctgtcatgatctgacgtctgactgcactcccagcgctgtatgttcgaaccatgccccatgactcggtttccccaaaagcctcgttcttctacctccatgatttgaaatgccctgtactacctgcgggacttttaacagggtctctgtggcaccccagtgcctggcacagtgccctcgcctgaaaggcctaatgcttgctgaacggctggcggagtgactgagtgacagggaattccaggagttaggaaaggggcttccggcggtcgcaccgacgcccctcaccagctgccggtcggccacggtcctgtcaggcacaaggctgtacacctggctcctcagcacgatgggcggcagcgcgtcctcaaacaggcctcgcgggaacagctgcatgagttctgagacagccgcgcgcgccgaccctgggcagataaatcggctcacggacagggaactggggcggggacgcggttctaacaaaactctcggctaccggaagcgaggccccacccccggggttgccatggttacctggctcaccccgaagaggatccgactccacaggccctcgcttccgccgcctcttaactccaaaggtctccgggatcaggtgatgcctcttccagctcatatcccgggattttatggtaccggggaaggggtaggaatggagggaagagaacctgaaaatagggtcttccggcgcagagcagtgacgtacggtctccccgggcgtccctcctagaccaggtgatgacgaaaggagcgtcaacttgtcgtccctcaggcccgtcagtgctgggaggggcggtggcgacgcacataccagcatcacctccgccaggccgggccccacgccggccgcggattggctccctccaagggcacgcacgcccggggactcgttggcggcgtggaggggcgccggtggccacgttggtgtcaacctccttcgtgaagctcacacctcccccgccccgggaggggtttgcccgccactgtcgctgaatgattgcatcatcgaaagcagaaaaccacttttgcatccttcggcctctggcgtgcctgccatgacgtcatagctctgcggaggtggaagttggggagctttgaggtaactggattcttgatctgagcgcagacgtccttcctaacctcactgcatttggaggacctggagggagggtgggtgaagggcaaggaaagaggcaggatgagagcttggccgcggtggcgtctgaggggcctgaatgtttcaaggccagagcctggcgatcaggtggctcgcttagtcctaaaccagtcatccttctccaggcctcctctgtagaatggaaactctgtacccctgcttgtcttaggacctcatggatcccagggggaccaagagaggagctgagaagacagaggtagctgagcctcggaacaaactacctcgtccagcaccttctctgcccacagaccctgccctctactctgggccctttcctttctaccggcgcccttcggaactgggctgcttctccctggatgctcaacgccagtaccatggagatgcccgagccctgcgctactatagcccaccccccactaacggtccaggccccaactttgacctcagagacggatacccggatcgataccagccccgggacgaggaggtccaggaaaggctggaccacctgctgtgctggctcctggaacaccgaggccggttggaggggtgagcaaagcgtggtaggcagtatatctggagacccgtacctaccctctaaaattaggagagccaaagccggggtgagaatcagtccttagaagaaacaagactattcttcgaggggagcatctcactaatgcttgtgtcagaccttcagcctgtaactcctgcctctcaggggtccaggctggctggcagaggccatagtgacgtggcgggggcacctgacaaaactgctgacgacaccgtatgagcggcaggagggctggcagctggcagcctcccggttccagggaacactatacctgagtgaagtggagacaccgaacgctcgggcccagaggcttgctcggccaccgctcctccgggagcttatgtacatgggatacaaatttgagcagtacatgtgtgcaggtgagttgcccctgcttcatagcccccttccccttcccagaggttgagagcccgccacgcctgctgctgcttctctccttgtgcagacaaacctggaagctccccagacccctctggggaggttaacaccaacgtggccttctgctctgtgctacgcagccgcctgggaagccaccctctgctcttctcaggggaggtagactgcacagacccccaagccccatccacacagcccccaacctgctatgtggagctcaagacctccaaggagatgcacagccctggccaatggaggagtttctacaggttcaggatcggggtgggcagggcgagagcttaggcttgaaggctgggaaagggacttggggaggagggtgaaggcagaatggagggtgcacgaggggtcccactgatcccttgcttttcctgtcagacacaagctcctgaaatggtgggctcagtcattcctcccaggggtcccgaatgttgttgctggcttccgtaacccagacggttttgtctcttccctcaagacctttcctaccatgaagatgtttgaatatgtcagggtaagggaacgatgttgcagctcccacccgtatccccaaacaccaagaccacaggtctagcatccagggcaacagcctgccttctctcctcccaccacccccactgcccatcttctgcctcctcctctgcctgctccagaatgaccgtgacggctggaatccctctgtgtgcatgaacttctgtgccgccttccttagctttgcccagagcacggttgtccaggatgaccccaggtgaggcattcagctctgtccctcccctctggatcccaggatccagcctctggccctcaactgatgcctccatctgccccccaggctcgttcatctcttctcttgggagcctggcggcccagtcaccgtgtctgtacaccaagatgcaccttacgccttcctgcccatatggtatgtggaagctatgactcaggacctcccatcaccccccaagactccctctcccaaatagtaatgctttagagggaggcagtcatatctctgtgtgcagataataaaagcatatttctaagaggttctctcgctgtcttcttagctgagtcatccctgtccagcaactcaagcacacaacagtgctttgctgttttatcatcatgtttttacatggggcattcactgggtgtagaggctggccgcaaatacgatgtcccgccgtagcaaggtagccgctgtctccatcttggcacccagcacaggctctcctaccaggcgggctgccccccgcagtgagcgacacatctcagccaggcgctgaatgcagcggaccaccaggccctcaggggtccctgagagccctgccaactcggagaagggctgtggggaaagtagggtgaggactggatgcactcagcctgggcaggttctccccagccagccgtctgcaaaatcccaaacctcaggtactcaccatgccccgggcccactcatatacaacctcaaccagcccaaaattcagctcccccacaaattcctccaccgtctggttcaggccacaagccacctggacctcaccaatccgcttggccacagcccggacacgttctattccctgcaggaaagaaggagagattaaggcctgccttcctgctccaggacagggaaggaccagatcaagaaggcagccattttccatccttggggcacttacagggctggagggggtcacctgggggactacctgaaggtgaaggtcaggaatgccacagccctggcagggagaaaggggtggtgtcccctacctgcttgagggtgtttgggagctgatccccagcgtccccagggctctggcagaccaggccagagagcaaggcagcaatctcctcaggccgcagggtgctcagtgcattgtcaaacatgagctcagtgaggagcaactcatggctgctcatggcacaagccacccgccctgccagcttcacagtgcccacctcgtccacgtaacccagggttcggagcacctgcaagaaaaagggtgggcattggacacactgctgtcccctagcccccctgccccaaccactgccccacccacctctactcgctgatggtactcaggaagcagcagcaatgactgatccgacagtaggaagcgcagccgctccatctccttctgtatctgcattcgctcccgcagcttcaggtactgcagagagccacccgtcagccttctccttgccccttagcaggggtgcactgaggacaagggctgagatgggggcggtcagtctacaggggaccacagaggaaaagcccctactcccagcttgggagttaccacccagggtcctacctgggcaggaaaacgggggctgtgtacacactgagccccctggatcagctcctccagcttccgggcccggagcccaccctctacaactgacatatctttgagctgcaggtcattgacagggtcgagggtgggaggtccggctgggtgggcctgagccagacgcagcagttcctggacagcagtggtcacggctgcaaggggaggatccttcctgaagagggagcagatcttaagatctggggtaagatcttctctcccccagaagcctccctcaggctgtggaagccctcttactacaacctccacttcacagtctcccttaggctgggggagccccctcactacaaccccaccacttcatggtctccctcaggctggaggaaactcccagaccactgcccctccctgcctctacgtgcccctctggaggagaagggcctccctagcatctctgacttgaattttggctgctgcctcttgctgaagtcctccaagatcttctccccattcacccggagcaccttggtggtgatggcagccatatctcctggctggagcttgaccatggtgtggtcacaaggccctgtgaaaaggggagagcagggcagacattgccatggacccaggcatcctgcttatactgctggcagaaaacagacatctgccacactctcaccttcaggcaggaacagcttgaatcccacgaggtcatctggatagggcacctctgcagtggctggccccctgtcctgtgggtcctgggacaagggcttatcacacaagaccagggttgtgaatactctgctggtggagttcgaggagacctgggggtggtcagagaggccaggagaggggggtgtgatgagtagacatcaaaggcagagaccagatacccacccttgggcaggaatcaggaagcaaccatgcagagctcaccagtagagaggggcaaccaagtcaagcgatcagagcagacttcttggggtggtgggaggaaggagtgaacatgatgtggtgatgggaagggagggtgaaaaggagggcaagaggggaaaatgagggccctatgatgacgcaacctgccctggccaagtggggaaaatggagagagggcttgctccctcccaccctctggagtccaaattcccatcaccctcacctgtaggatcactcccaatgcgttgtgatgctcctgattcttcacaaccaccacccttcctgctgagagagacttcagcccgttcacagactccatgatgcgtcgctgaagagcaaaggacagatgggaggaggcatcacagggacagacacttggactaagtttagtagcacctagagtaacacgatcttctcttcccttctcctatcacctcctcagcactcacacttgctcacctggatcatgtgctgggtctctgtcagttcctccccccagctgtaatattcaggcaggtcgaccagttggccagtcatgtcaggctcctccaaagctcccagcctcttggtcagttcagccagggcctgttcatgggccttgggtgggagcaggggaagctgtgaaaggggagtctccaggcccaatctgtcacactccccaccctcaacacactggcctctggatgcctacctattcccagcctgtctttggccaacctcctgctccacacactggttaccccaggctccttaccttgctgtctttgcgggagggaaactcagagaagctcctcttcatcatgtcctccaccctgagggcatccactcgcagcaagttgaggatcatagtgtacgtgaggcggaactgggactgcagctgggacggcttcccctggagtcaggtcacagaagtcactgagatcagggtgggacctactgaaccccagccagtcttctggactgggcctactcccgtcagatccggtcctagctctgcaaccatggagccttggacaaaccacttgctcacctcttctgtaacataagggagcaaactgaaataaatggactcaaaggccccatctagctccatattcacatgggagaaaactggaagagatgggctccaatctcatccttggattcactcactcctacctcagcttctcccaggcaaaacaaaaaagtcggaggaagttgggcgctgtggcccacacctataatcccagtactttgggaagctgaggcagacagactgcttgagcccagaagttcaagaccaacctgtgcaacatagcaaaacctcatctctacaaagcataaaaaaaaaaaaaaaattagccaggcctgtgtggcatgtgcctggaatcccacctacttgggaggctgaggtgggaggatcccttgagcctggaaggcagaggttgcggtgacccgagattgtgccactgcactccagcctaggtaacagagcaagaccctgtctccaaaaaaaaaaggaagaagaaaaagaagagaggagaatcgaagacagaatccagcaaggtcctggagctggggccctgccgagcatgctggcccgctcaccatcatcatgcggtgcaggtctgccatctcgggcactcggcccttgcagagcaggataacggtgcctgtggggtccaggcccctccgccctgcccggcctgccatctgcacatactccccagggagcaggtcccggaaggtggagccatcgtgtttgcgcatggagtcaaacactactgtacgagcaggcatgtttactcccatggcaaaggtctctgtggcaaacaagacctgggacagaggagaacagaaaggatcagcaaaggctctacatacacacacccccagccctggccaagcccaccttactttgtaggcataaggcaccatcccagttgttacttatgggatctcactgaactctccaggcaaatctatagggcaggtattattgttttcctcattttacttatgtagctacttatttctatttcttaacttttaccttcatatcccattcccatccctgactgcaatcattccaatgtatccaacaaatatctttttatataaatatgatcttatagaacatgtcttcttttgtgagcttgtagtttataattcatataaaaagtggttatatatctgatttttttttgcttctttttctccacctagtgtttcaacatttgtccatgttcctgtggccacatctaacccactgcttccaactgctgcagaacactctatgggtgcatcccccacactaaccttccctctctcccagtgaagggcaccctggtactaccaacaccatgccaccacaaacaaaggatgggtgtacatgttctctcacagaccagggtgagaatttctttgtgatatatacccaggaatgaaatataagctcagagtatgatatagtttttgtttgtttctttgtttgtttttgttttgagatggagtctccctctgttgcccaggctggagtgcagcggtgctatcttggctcactgcaatctctgcctcctgggttcaagcaattctcctgcctcagcctcccaagtagctgggactacaggcacctgccaccatgcccagctaatttttgtatttttagtagagacagggtttcaccatgttggccaggatggtctcgatctcttgaccttgtgatccacccacctcagcctcccaaagtgctgggattacaggtgtgagccaccatgcccggccaatatagttattttgtctaaatagtgccagcgtgcattccaaactggctaggcatcccgtaaaggattcccagaaccctacaacctcctatatctctggcaacactcggcatgaactagtttcctaaattttaccagtctaatagctgtaaagtcgtatcttgtgagtacttcaatttgtatatttctgattactaataacttttcgaatgcttgctagcttcctgggtttcttttctgagacctacgtattcatatcttatgcatccccattttaagatgggaaacctaaagttcaggaaggttaaataattggtccaggatgatactgtgaatacatggtgtacctgggattcaaacccaggtagtctgaatccagagcccagattcttaaccacagcactggcctgcctaaacctctgcccctctgccctctggacagcccctaagtgggcaacaagcaccctgaggagtccctttccaccaccacatgcaccttgaccaggccacggctgaagagcatctccacgatctccttgaggatgggcaggatgccgctatggtgcacacccaggccgcgattcaggagctctgacatgtgcaggacctttggtgggaggaggcccatggtcagggatggagtctcggaacaccctatccccaccagtctgccaaatgtgtgcatgcacgcacacagacgcacacagacgcacctggggcagctggcggtcagagccacggaggcgagcaaggcagcgctgcaggaagaggtggatctcgctcttctccgaactggtggtgaggtcaagggaggtgaggcctgaggcctgctcatcacagcggccccgggagaaggtgaacaccaccacgggcaactgggcacgtgtgcggagggaggccaggagggacaggtacactccgcggtcctggagaaggaaggggaaggggaaggagcagaggttgagttcctgaaccaatgagaggtgagctagtgttaactggggcagtgctcaaagctcaagtcaaaacccctgggggacaaggggaaaaaaaagataggaggaaaaacaggtgctggcaggtacaaaaccctcccagttctcacctgtgcagggcccccctgatgtgtgggctgcttggccccaaaggtctgggcgtgtttgctcattctctccttcttggcctccacagctgcatagtacctggggcacagggaggggtagccacaatgtccagctgggggcccagccctaactctttcccccatctcgaggcttacccttttgtatggaaggctcctcgggagtccagcaacaaaaagagctccccctgggtcttggagctgttccctgtgaaaagatagtgctccaggggcacggggcgggttacagtgctaatcacatagatctgacgacgcttcagccgcctgaagaaaggagagggaagcaggtcaggggtgggaacgtgggaaggaacccgcatccccacccccttccctacccctccaactttacccagtcttttctgagacccagaatggaaggctatcccccaacatctcatcccatttcaacatgcaaagtaatctggacccaaaggggatcccacagccaccaggtgggacatgttccccagcatcacccctaaggcctgaccgctctccttgctgtggtagacttagtcccccacccgaatcaaggagtactgtagcccccttcacccaggcaacccgggacacacgtctcacccaatccagtcagcaaactcaagggcgttggggacggtggcactcagaaggatgatagaaacgtggtcaggtagcatgataagcacctcctcccacacgaccccacgctgggcacagagagggaagggaggtcacatgagggcaggggccgcccttctgcccataaagaggcacaggattccatatgggggtaaagaaagcagtaaggggccctgagtgtgtggaataagggagacgctcaactggtcccaaaggagaggactgccgggttctggggagcccatggcccttacctcgacatcgttgatatagtgaacctcatcaaagatgacccactccaggtcccgaataacatctgagccactgtacagcatggagctggggagaagaggccaaggattgactctccagtggctcgtctccaccccctcctcagacagcacactctccacaacggccacatcttcccagccaaaactcccctgtattgagtgtccatctctcaccgaaggatctctgtggtcatgatgaggcaggaggcctccggatgcagctgtacatccccggtgagcagccccacatccccgaatgtgtttcggaagtcccggaacttctggttgctcagggccttgatgggcgaagtgtagatggtgctgggaagagagcatgaagttagccagtccctccgcagactcatggcccgcacttcctctcccacatggagccctcgtggaagcatgccccagaagctcaggtgctcctcttcttcacccaaactgcccttacattctcctgcatgatataaccccagaaaaattctgtccccaaccccttcctaaactaacccaggtcattcttctaaactttctccccaccatgtcttttcatttctctctgggctcttgtctcagtcttagccctgaacctctcacttaaaggatgagctagagaggtgggggaagagatgagattttcaaaggatgcaggagaaaatggggctggctggtgaagggggaggttggcaaaggaactcataccgtgtcatgtgtttctgggccagggcaatggcatattcagccacaactgtttttcctgcagatgtgtgagctgcgacaaagacagagtcatgccgttccaagtgcaggatggcctgtttctgaaacacatctggctcaaatgcccactatgggagagagaaatagacaggagctgaagaaaggagcggggccttgctgcctcctgctcatggagcacgcagggcgggcggatgaaggccggagccagccgaggctgggactgagtaccaagactggcctgggatggatctgacctctggccaatagaggagacaaggggtcggctgggagtgtgacccagaaagaggtagaggagcgtgtgaagatggggccaaagtacctggaaggctggctggggaatgaggcgatagaaatcaccaacaggggaggtggcgtccacagggatggcccactgctcctgagatggaggctctggggcctctggggtggatacagctgtggacgcttcctggaagagtcaggggtagcagtgataaagatacaaccagagggctctcaattagcactcctcccaaaagatgtccctttcttcccctcagacccatcctagccagcccacatcctggtggcaaggctctttcttgcctccactacacagaaccaccaaccttcaacactaggtcttccaagctgcttgctcgggccaggggagcactgcagggagaggctgaaacagtgtcccctctgggacctcctggctgtcccactgcctcattctcatcctcgtcacccccacccaaatccagaggctccaacagacagctaaggcttagtagtccaggagctggagttggacaatctgaggagcaagccaacaaggtcaaccttgtcatgtccatctctgttccttaggagaaggacatgacttctcctacaccccactcaaaaactaaaactaaccttttggtgcaaagtccatgcctttcttgaaaccaggtggaatagtaagaagatctgtaggatagggacatggaatcaggtcactgcacactggtgaacaaattgtgtacattatataaacctaaaagataccatttacaggacagatgctgtagatagggatgtttgctatgacactttcccaacagatgacagtaaaggttgttgtagaaatttcccagcagatgacagtaaaggttgttatggacagaatatctttttctaattttctcaaaaacatgggagggctagcagtagcccagtgatagcctgggctcttcctcctcaaggctcagactcagagccccaccttacctttctcaaagtctatctcctcctcagcctcctcccgtgtgttcagatctgttatggtgggttcatccatcccccctgggaagagacaggacagacagggattcatgggatgagggtaatacgagataggtggggaacccttccctggagattaaagacaccctcttctaccatcccatctccacaagagtcacctggccagaagggataccgagttggatttccccataaggactgggaggctggccctggaggccggcgaagagacaaggaggttgtagccgagagatttgtgttctccagcaagacctaaggcaagagatcagagccccaatgaggctgagcttgtctctgaccacctccccttctccccaactgtttctcatgacccctgacctcctacctctttgtaacccagtatctggcctgtggttgggtgtctttgggcctgtaggtcggatgggactggggctcccaggacagccaaaagagaccagggatccgtcttcctctgccattttctggagagaaaaatagtaacttttgggtcttctttcttcctctgtcccagcttccttcaggaacccatcaccctagtctaagcccctccagactcctcaccgggctgagtgctccacaccatgcagaggcagccaggctggggatgacagaaacaactgttctgcttcttgctgcagatctggggcacaaggagggaggccatggggaagctgaaacaagggcaagatgagaggcattaggtaaggaaagaggataaaatgcagacaaaagagatgatgggacttgtgttcagatcagaaatggcagatgtgtcaaacagactaggacaatcaggcttggccaaaaactacctgctactgaattacctggggcagattttggatttcagaaacatggaggctggacctaggaatgtgcatttttaaaaagctccctggctaatcatgaagcacactgaaattggagactcactgattttagaaaaaggggtcccagacctaaggatgaaaggttggaggctcaaagcctatcatctcagtcaccaagtgccctggtgcttggatacagaagggagctccacggagaaatgccacatttgaaagagcagctctcaaagcaaaaatatccccagccctttctgctctgtcctcacacgtactgcaggtacactgggctgtaatctgtccagcaccccttcaggctgggatggacaggagtacaggcacagatgaacaaggttaagctagatcctactgtgaggagggtgaaggaggtttggactcaatgcgggtcaaaggttagggtcaaaagtcactcacgctactctctggagctccaggcaagttcagcagctcccagtgccccgtgcatccgagctccacggcccgaaggggtaggtccaggggatctggagggggtagcactacggggaaaggtcaaaagtcaggggtcaaagttcattccatatcggctactccgttccatttccctcccctccccctcaccaagtcgctctgtctccatcatcctggagccacagcagctgcctggcagcccggaagtgcggcaagtagtcgctgcgaagtaagccccgccccggaacgggcggaagtagaggcaacttccggtacagccccgccgagagcgtgaactatcgctgcggaggggcagacctggaccggtggaaggccgggcggaagtgcgcgcctggggccgccttggttaccgcgttttccgctcctcgctacgtcatcgttgtgagcccgctatcagcggccagcgcgggcgcggccggagaccgtggggcccccggttgccgccccctcgggtaaggccctctgcttctcactcttcggccctttttctcatagccgtttctctgttcttcctctttgcgttgctctgcgggcgctacgctggctccaccgccttctctgccgttcaaaccccgcggttgtccttaccctagcgagggtaggggggtcgggtgccatcgtctttccgacggagtggatatttgtccctccttgaaccacatggtacctaaaggtgctggtgtctgtgatccctggagacaggagggaatgctggatgatcccgaccagcgggagcttggacagcagcctggtttaagcaaggggtagggaaagccaaagacaagagtaggcagacctgaaggggtggggttgggtacagtgtggacggcgtgtgaaccccgggtggtaacagtggagaaagatgtcttgggccctgcccctgaactaggagccaccatgttggtgataccccccggactgagcgaggaagaggaggctctgcagaagaaattcaacaagctcaagaaaaaggtgagggactgtgtgtggacatggcctaacctttcacagactctgcactctgagaagatatggggtgagtgtgagcgaatggggaagtttttctggcccatacctagagacatatcacctcacagtgtagcttcgagaggtgggctttcccaagccttggtgtggaccttctgtcttttctatgcaatttgccatggattgtcttcctttcccatggcttttagtaccgcttaagagctgatgatccccaagtttgttttttccagttctatccagtgttatactgaaaaacttcagatactcagtgttgaagctatcatctttctattcttgatcttccaaataagattgactacaccaattctgccacatgtttggactcaaaactctgacttccccactatttgcatagtcaaacctttgccaagtcttattgtttcttcttttgaagtaatttttcctgtttattcttcactgtgcattcccccgagcagggctttattgacattcatgtgggccattgtaatggtctctcaacaaatttctcagtctttttttttgaacagacttcttcactcctgttcaaatgatccattgaaaacacaaaattctgctccctctgtttctcaaaaaccataaatggcttcacattgtctataaaaaagcctcaaaaccttagtttggcagccttgtctagtaaagtagaactattcactacttccaaaagatgcattcccaaagccttcttatctctgcatctttgccaccctgttttctttttctaaaatacccttctcctctctgtgttgtgcagagatacgggagagggcctagtttaatagccattaaacatcagaaaatcttactagctttcagctatgaataatctgcacctcttataattgtattgctaactcaatgtattttatttctcagactgtaagcttcttgagggtaggaacaatgcattagcctcctggatatccctgttacgaagtcatggctgggcctcattcaatatgcaggaaatagatggatgaagcttccaggaaaggcacataaacttatacttacttgcagcttatatcctaggattctagtccatgattgagttatttgtcttcaacttcaaaaatgtaacactctggaaaacctctgggttccgtggtttggttagattaggaatttccagcatcatacatgatctaggggaccagaggcaagaggcagagcacatcagtgtaccactctgagggcatcaagaaagatggtccctggagtgatgtgcccaggggccttaggagaggaaccggctaggggctggccctcacttacctctctcttctcacccttgttcccagaaaaaggcattgctggctctgaagaagcaaagtagcagcagcacaaccagccaaggtggtgtcaaacgctgtgagtgacaggggaaatggggatggactggaagtgggcagcatggagctgaccttcatcatggcttggccaacataatgcctcttccccttgtctctccagcactatcagagcagcctgtcatggacacagccacagcaacagagcaggcaaagcagctggtgaagtcaggagccatcagtgccatcaaggctgagaccaagaactcaggcttcaagcgttctcgaacccttgaggggaagttaaaggtgagcacaagcagaaagattgtttaaagggcatccctccaagttggaatgtagatgggtttggggaaaaatatgcatactcaagcactggcaaattgctgtaccattctgagtttcacctctcatgtataaaatgaaaaaactagacgactcctgaattctccattttacaaattctgtggttctaatccaccttggattggagctcttggaatatgttgccctaagggatggaaagggctgaaaatgttatcaggttcaagagaggttcaaataaactgaatacataatatatcgagtcacttataaaaaataccagctgggcgtggtggctcatgcctgtaatcccagcactttgggaggctgaggtgggcagatcacttgagattaggagtttaagaccaacctggccaacatggtaaaaccccgtctctactaaaaatacaaaaatcagcagggtgtgaggccgggcacggtggctcacacctgtaatcccagcactttgggaggccgaggcaggcggatcacgaggtcaggagatcgagaccatcctggctaacaaggtgaaaccccatctctactaaaaatacaaaaattagccgggcgtggtggcgggcgcctgtagtcccagctacttgggaggctgaggcaggagaattgcttgaacccaggaggcggagcttgcagtgagtcgagattgtgccactgcactccagcctgggtgacagcgagactccgtctcaaaaaaaaaaaaaattagcagaatgtggtggtgcacacttatagtcccagttactgaggaggctgaggccagagaatcacttgaacccaggaggcagaggttgcagtgagtggagatcacaccactgcactccagcctggacgacagagcaagattctgtctcaaaaacaaaacaaaacaagccacaatggcaggtgcggcaatggctcattcctggttaatttcagcactttaggaggccgaggtaggaggattgcttgagcccaggagtttgagaccagccctggcaacatagtgaaaccctatctctacaaaaaaaaaaaaaaatacagaaattagccaagcatggtagagcacatctctagtcccagctactagggaggctgaggtaggaggattgcttgagcatgggaggtcaaggctgcagcaagctacgattgctctattgcactccagcctggacaacagagcaggaccgtgtctcaaaaaaaaaaaaaaaaaaataagtaaaaccacgtcaaataagaaatgtatgtagaattaaaagggaagaaaagatcagaggaaacctagaagagggtgagggaagaggaacacctctggtccatggttgggcaacctcctgctccacactgaggtaggtctctcaccactccaggaccccgagaagggaccagtccccactttccagccgttccagaggagcatatctgctgatgatgacctgcaagaggtaaaggctcctaatttctgtccctgaggggttggggatggaggaatatgagagacaaatatattttggaccacatgtcagcaactggaaatcatcttaactgttcttggtctcttttacagtcatccagacgtccccagaggaaatctctgtatgagaggttagagagtagagataaggctgggcccatttggtggagttgattgcctgagtccttgggaggtttgggctgtaggagctgggctatagagggaatattgagtctccacagggtctgaggggagaaggtaaaacccccctttgatcttcagtctgcatctccccagctttgtgtcttctagtgatcgacttcgagaactaggaccagatggagaagaggcagagggcccaggggctggtgatggtccccctcgaagctttgactggggctatgaagaacgcagtggtgcccactcctcagcctcccctccccgaagccgcagccgggaccgcagccatgagaggaaccgggacagagaccgagatcgggagcgggatcgagaccgggatcgagacagagacagagagcgggacagggatcgggatcgggatcgagatcgagaccgggaacgggacagggatcgggagcgggatcgagaccgagaccgagagggtcctttccgcagtgagtgattttggctggaggtcaaggtgaccttaactgaggtttatgtgggtcctactaagtgaaatgtggcatgggctatgtcttgtgactatgatttgtgctcccaaagggtcggattcattccctgaacggcgagcccctaggaaagggaatactctctatgtatatggagaagacatgacacccacccttctccgtggggccttctctccttttggaaacatcattgacctctccatggacccacccagaaagtaaggatgacaacagggcatgatgagaagtcctgggagaatcctggggtgtgagacctgagggaagaagctgccctccctgcagccgcctattatcactgggtttggttgggtccagaagagccccttggctctccactgaccgtgttttctcttatcccagctgtgccttcgtcacctatgaaaagatggagtcagcagatcaggccgttgctgaggttggaacttcccaaatctgttcttcccatcgcttctgctgttctcatgtgttctcctcaaaatactagatgccaggaagaagttggttcctcttgataaagaaagcctctccctattcacacagaaaaactcacattctcagattccttattcagtctcctcctaggatagcaactcctggaataacttctttggtttatctgtaatgttttcctccccatcctctgcctcccctcttctgcttcagctcaacgggacccaggtggagtctgtacagctcaaagtcaacatagcccgaaaacagcccatgctggatgccgctactggcaagtctgtctggggctccctcggtaagaatgggattcttcctttcccatcctctcccccacaggccattccttttggttcccccacacatccttgggtttcctagagatgatcgaggtcagagtgtgtgcggaggctatgggaatgggaaggaaaatttcagatcctctgtcagttagaggtaaagaaaggagagaaaaggattgaaaacagcttccaaagcagtgactggaacagggaagaaagtgggagctggagtgagattggtgaggaagatgagtgtctcatggggcttgttcattttgagatggagtagagtgagtttcataagtattcgaaatcagggatctggaactcaggtgtgaggtaaggaaggaaaacatagattaagtcatccacatcacagggtggctgccaaacaataggatcatcagggagactctgatttcagagaaaaaaaaacgacccaggactcagtttgaggagtactctgggactatgttaggaaacaggactgttcacctcacaccccacatgtccccagctgtcctgacatgttaggctaacgttgagcctaacgttagcaaaggagacaggaggaggggtcggagggctgggagcagcaccgcaggggcctgggccactgaagcaaaaggacacacactttgagaaagagggagtagccagcagtgttgaggcacagagatcacaggatgggagtgggtgagagagattctctgtagctcaagggtggtggggatggaaccattggatggggtgaagagagtaacatgtctggtggagggaggaaagaggaaggggaagaaacagctagaggcttaagagagaatggtgagggccaaagctacaccctgaatgagttctggtggagctagtagcatttcttagtgtgaataatccattttccctgaaagtagattttcctgggaaaggagtgagcagaaagaagggctcagctacagtggcccttcaggcaaaagaaaggaactagaattgaccagcatgtcaaaaaagggctacagaggttttctagtttttagcttctgacatactgactgtaagtagtgggttaatatcattcacgtgtctcaacaatgacatttgggatttttctaagaacaaaacattcatcaaaatgtccacttatacttttcttggccatgggttggcacaaaggagctaaggaagacaggccatcctggccaccagagggcagcgtggaaactgggcttccaggggccagtggccaggagtgaggtggtcaggagtcagcctcagggtctgttctatgatctcctttagaccttaactgttcctctcctccctccctagctgtccagaacagccctaagggttgccaccgggacaagaggacccagattgtctacagtgatgacgtctacaaggaaaaccttgtggatggcttctagggaacagagctggattccttgtgcctcatatgccccaatgctggtctcagtaaaacactgaggtggaagcttacacatctccctcagcctctggtttttcagcacttgggattggggttaagcctttaaaaacggctgtcaggtttgatctcagtgtaacgacatggccagtgcctgttccccactcccttgccccaaaaggatctggaacacaggtgttgtcgcagctgttttaattcaatcccacgcccctgtccagcaggaaaccccttatagaaaacccaaatcctcatcttggagtttctccttcagccagggcagcacttgaaagaggttgatgtgaaagtctcgggcgtgagcaggtacctgcttttgccgcttctggtttttgcagacatccactactccccagctgattacaccaacctgcagaggcagtggggtgccatggatcattcagtagaattcctaatcctggaagcatggctgttcctgcttgtgtcttagctgacctaaaggaatcagactagggacccagctcagcctcgttcttgacacacgcaggcaagacatgcggtcctaaggtgaggcaggctctgcctacctcgaattactagccacatgcattgagctttcctgctttggggcccatgctgaccacttggcatctccccagataggaaagggaggactcacttgaatgaaacgacttctcttgtgaactatcaaggggccgccagaatcacctgcaaggagaggagaagctgtagagaaaaggactgttgggccttgggcacttgtagcacaaccaaagagcattctctcacctctgcaagtattggggtcagcatagggactcactcctccagtacaaaggaaccgaggggtgaccacctctgagatgtccttgactttgtcatagcctggggcatattgagcatctctctcacagctgcctttctgtaggggaggtgggaagcatggagaagtaatgaacagaagtggcttaggaaggattggggcctagagtgcctccttaggatgcccgtttctcaccttatccccattcttgatgtagacctccttccgagtcagctttttctcctcctcagacacaaacagagctttgatatcctgtgcagggagcagctcttcctctggacgaatagactgcgtcacttcagctgctcccaccactgtcatctccccattgcctttgtcactcagtagatgtcccctaagcccttctagagctaggttctgggccaggcatcatctcttcctattgcacctccctctcatgccccacttgtctcttgggatctcatccttatcctcttgccaagtatgtcttactttgttgctggcaagtggtagttggaggaagcctcaaagctcgagttgttccctcggtgcaggggagacaaatgggcctataaaggacaaggagaacagcaaaccaggcctgctcctcaccccagtcctccagcctttcccagcctttcctcagggatctggacgctctcacctgatagtctggccatatttcagcttattcttgagcttgatcagggcaacgtcatagtcataaaattcaggaattcctgcttcttttttcccattaatgttgtagttggggtgaaataggactacttctatctccaggtcccgcttctcccctcctgaagtaggagagtaggtaccacctctttgtgggcagcttcctgcctctggccccgtgtcattcctaacttcacgtcttcccccatccctgactggtctggggtgcaaggaatggggctgcattgaggatgggtggagtgtaggatctgtagaaagtgggaggtgttgcctggagagcataggtgcagcccaggaccttcagttgcatccttacctacgctgaccttgattgagtgttccttgtcatccacagtgaaacaatgtgctgctgtcagcacaaagtactcagacaccacagcccccatacagctctcgtgtccctttgaagggcgctggggacacaacagtagagagggaaagctcaactttcacaaaccaccatctcttatggccattttttccttcccctactcccatttcaccttgacctcacctcccccaagtccccactactgggattctgtgcttacaatgactgagatcttggcctgccatggttgcttgtggtaatcggtacccttcctgtgttcccaaaccatgccacagagactcagagactggctttcatctggcagagaaggagaatgtgctgaaaactcggaacacttcattcccaaatggcagcagccttttgggtaggagtctatggggagcaaaggcccaaaaggagaaagggaaagaccacgggtatttgtttcctcgtgttaggagaaaactgctatggtggactgaaaagggaaagaacttgggatcaagctgtcagaggcctggctgttttcaagcccacccttgttgctaacttgctgtcccttgacctcctttggcttctgtttccacatgtgtcaaatgtaggactatagaaagatctctgaagtgctcagagctctgtgattctaaggttaagtgaacagtgccaggaaacaagaatagtgacactgaggtagagaaggaggaatgaagaaggctttccaggcaactagagcttcaggtgtagaggaagaatgaattacttcaggggaacctgaggagagttgtgttctttattcccttgtatctccctaccgatcatttggtagaaaacatcttccaggttttccatatccttgactttgaacacatgttgctcattgtctttcttggaagccaaagcattgatgttcacttggttcaccaaaggcccgaccccaaacacatagacatctgagggataaaaaggaaggatgagggtccaagccctgaggaagtggggtgctgggtcctaggcaggttactcacccagataatcctcccttgggtttttgcgatccttgccaatgtatagcaagtcccggatctcatcaatgacagtaattgggtccccgcccatgttgtgcaatcctgcagaagagacaggaccatgagggtaggagataaggaagataaactggctaaaggcagggatacacgtggcagggtgagcaagttgaggaagggttagagatagttgatcacagggcttaggaagaattccttatgaagggtcacaggagagatgaacagccagctatgagtcacattcagggccccaaccatgggtatagtgttacaagtggacttaagggccacatgctggtctgagaaggtggggaggctgggacaggagagaggtcccttctgaccatcagtcatgaggatgatgacatggcgggtgcggttccagccttcaggagggacgtcatctggccagctcatcatgctgtacactgcctggagggccttcttggtgttagtccctgacttcaacttgtggtctgtggagagggaagagaccatcacctcacctggtcttccaagccatcttttaaccccagagaccaatctgcaactgaaatcccacatctttcaactttttaagttaatcatcattacacggacttccctttgaccacaaagtggcccttccagcccccaacaggttcccactaacctccattgcccaacgatcctgctgttcaacctttgactacaaagtggtcctccctgtcgccctcaaggtagtctcatgaccccctccaccctgaacctcctgaccccaaagtgaacctcccaccattccctaacctctgaccttcataattgatttcattgagctgcttcgtgacccagtctgcattactgctgtctgcttcagacactttgacccaaattttggggtatgtggcatatgtcactagaccatatcttggcttcacaccataacttgccacctgtgggtgaggagaacaaggcgccatggcattgaaaatagaatactgtgattgggagatttcagcgactttgctgggacagggaggccctcagtaagaggctcaagggctgaggttcatggaggaattaccagtcaagaaactgcttcaagtaaaagggaaggaggacagaataggacctggagattttcctggggccctgttgttcagaggggctggaatgatcagggagctagtcctggaagatcagcgagattccattcccccgagttcagggataggaggattccaccttctcaattaagttgactagacactttttggctcctgtgaagttgctggccccaatgctgtctgatccatctagcaccaggtagatgttcatggagcctgaagggtccaggacgatcttccgcttctgttgttcccctgggtgccaggagagtggctcaggctccagcattaacagttctgtcccttctccattttcccccagttccctgccctgcctcccttctctgtcttcaaacctgggccgtgcccatcctcagcatcgactccttctatggtctctgtcagggaagacaggaaagcttcggccacctcttgaggggtgtcgtacatgaaggagtctgggagagtcagaaatgaggtcaaatgtctgggagtgtcagggatacagtgaccaaagagacgggggatcatgggtttccagggtataaaaggctcagaagtgagatagttgtacagggaggtttaaacaaagtgaggaaagagcagggttgaggtggggagagaagacagtaggatggaagaccaggatctgacctgggggtacaggtcaaaggtcaccttggcaggaaggctccgtcccgctccaagagccaccttcctgacacgttcgccgctgggagccacgcagggtaagcccccggctgcagtggtaggtgacgctgtcttcaaggcggtactggctgcccaccttccttgtgccaatggggatgcccgggttggagcagtaccccgctgcagaggtatgagacatcgaggtaagcactgaagcctgaggccccgtgagcaaggtagagagcaagagttacagtgtccggagccgagtgcccactcctcgggctgggcgccgtcagggagacagcaatgtagggggaggggatgcttctcacctccgttgtcacagatcgctgtctgcccactccaccggccattcacttggcaggtgcgattggcagagccccggagagtgtaaccgtcatagcagtggaaagagatctcatcactcacattgtagtagggagaccggggccagtattccccgttctcgaagtcgtgtggtcttggacagtggattgctttgagaaggggggacaagtagaagtcatcaagagggaaaggctgccttaggtgtatccctcctggtctcggagaccatgtcactgagaaacagcgcattcccagtcccgcagaagcagcatcttacctactcctcaacccatatggatttccactgcttctccctccccatttctgagtgttctcttgacttccagggctgcctggaagcccagggtaaatgcttagtaagggttaactccgctttttcttgccccctttccgcctgccaccctaaaactgctcctactcccggtcagcccaccttgtcaccctgcctagtctcatcctagtcctgaccttgctgccgcctgccctgtttctgccttaggccactgcccacactcattgccctcaaacctctgcactctgccttcctgacagtcttttggtcttgagtcttcagggtgctccaggaccccgtagatctgcaggtacgtgtctgcacagggtacgggtagaagccagaaggacacacgtactccagtgcctggccctcttggagaagtcggaaggagccgcctttgatctctaccccctccagagagcaggatccctggggctgggccaaagaccatggagtggtggtcacacctgaagagaaaggctgatgaagcctggccccaaaaggccaaggagggatgctggagacagcaggaagggaaggttaccctcgcttacctccagacaagaggcccaagataaagggcatcaggcagagttgggggctgagattgctccccatggcgttggaaggcaggagagaagctgggcctggggcaggatggtgtgtcctggcttgctttgcttgtctgcttggctcagtgtccaagctgaaactccagacctagacctggtcacattcccttcccctgctccccaccagcccccagccttttatacaatctgtgttctggcacctgcggctcgccccgcctgtcctacccacatcactttcccggaacatccaagcgggagggccccgctgagctgccagtcaaggaaacagaaactgcagaagtcccaccctttgctgccaaaggtccaggactctccccttcagtacctcctctccggccttagctcctccccagtaagcccaaaccacccacttagggaccagaaataaggatccagctcactcccctgttgattgtgtgttatggtgcagagtccagccactgtttgtccagtggggtctctgacctgccttcctgtagctcttggagtcattctggcctccccctcccccaaggccagccctacctggcctccagatagaggcactgagagatgtggaaaccattgatttttattaatttcataactgggaaattccatgtgaaagtgaaacaagcatgagtcaagtcaaccagggaaggaatctggggacaggccaaggagcgggaggtggggcagcgaggcagtcctgctggtaggagccctgaggatttcccagcttgtgtgcgctgcctctggcatcctagagacccggatttactcagctaggagagaggatggatcacagggtctaagggtggccattcagaggtagaagatggaggggcggcagattctggcagggcagcagagggctcagtggccatggctagaggggtaaaaaattcaggacatcccccaggtgctgcctcagccagggctgcatgcggaagagattgatgtgaaagtctcgtggcggcgggaccttgctacgaggggcccttttgcgggagtttttgtcagcagagccaaggcaggggttgtaaagaccccagctcaccagacccacctggagaaaaggagagaactggctgggaggctgccacagccccaactgtaagccccaacctccctagatccctcaaaggcctccctcatccccccaacaaggctgagatcctgtaacccctgggtcctgcaagcttctaccttctcacctgaaaaaacctgaatctccgctcaaggaaaactgctcccccagattctcctgccagcaaagggtgacaggagacagtgtcatctagggcagtggactggtgttctggcatgcatgctggccacagagacacaggtggccttccccttgggaatccaggcatggtgagggactcacccttgcagggactctcatcctcctgggtcccactgcataggaactggtctgtcaccacctccctgacatctgtcaagttggggaacatggttttttcttgggagacaacctcggcacagcttgtccactgcagcaggggtggaaccagagagaagggtagaataagcagacccgggtgggtgcagtggctcacgcctgtaatctcagcactttgggaggttgaggcaggcagatcacttgaggtcaggagttcaagaccatcctggccaacatggcgaaatcccgtctctactaaaaatacaaaaattagctggtgtggtggtgggcacctgtaatctcagctactcgggaggctgaagtaggagaatcgcttgaacccaggaggcagaagttgcagtgagctgaggtcgtgccactgcactccagcctgggagacagagcaagactccatctcaataacaacaaaaaaagaataagcagacccagggacacctagcaggtttgtgaggcttgggaggaggggtgacccgcgtcagagagagaaagcagccagacctggagaaggaagagagacattctgggagctgtcacagggggatcccagcatccccaacctgagaccctcacctccactcccatcttaaggttaatgttcagtttgctcccattcaaggcgacaaaatgagcaggaacactctgtttgttcagcagttcattctctatagtcaagagaaggggatgttggtgctggtccttttacccagaatccaggttcctggcttggggactgcagcctagtccttgttatcacccccaaaccccggccccagctctcaagcaccataagtcccagcactcaccatggtccctacaggtgctgccttgaggtctccgcagagccagattggcctccatcgtgcagggaaggcagatgggcctggggagaagagcaagggtcacaccagcctgtccccagtatctcttccagggatctccagagcactcttccctgcagggcaccctcccatcccagactccaggcacctggcatgggtggacatctttactttctgggccagcttcagcagagctatgtcatcaccatagaactccaggattccctggttctttttggcaaagacatcaaaccctggggagatcaccgccttctcaataaggaattctttgccccactgggatttggggtctcctggaaatgatacactagattaggctagaccagggctcctgcaggggccagaggctgggtgaggtggtaggatctgtggcttcaggatcaggaggctggtgcatcccctgccttacccacattgaccctccacagggagtggtcgttgccatcgcggaagcaatgagctgctgtcaggacccattggtcggagatgagggccccccggcaggtctcttggctcttgggctgcaggggaacaggtgattttcagagattgcagtatgtctggcccatggccgcttttacctctggaatccaagccctgcccctccttcctggtaccttaatagtgacatgccagggtgtcctctcctggtcagaggcgtttgctgacatgttccccaccccgcagatggtgtctgtgagcttggagacatctgtgggtgtgaggatcagatggggaaggaggcaagtgaggggcactgtgtccaggttcccaaaacgggcctttggcgggctcctcaccatcctccccacaccaaggagggcaaagctcactcacccagcatatgttcaaagacctggtgcagagcctttgtgtcctgcagaatgaaggcatgcctctcaccatccttcttggaccctagctcattcagttctctccagtccacatccagcttgcccaccccgatggcatagatgtctggtggggaagagggaaatcaccagactcctgtggctttggggctaccccatgagacaggaggctgtcatctgaaactcactgtgtccaatcaagacctacatgagctggacccctgcgtcctccccactgctacctgtctgccttcatttcctgccactccctgcccttcactctcctgcagcacacagcctctttgaagttcctcaaatccataggcatggtcacacctcaggccctttgcccagctgtgcctctgcctagttcactcctccccccaagacttccacatggctcactttcgtacctttttaagtcttggctcaaatgtcaccttctcagtgaggccttccctggtcttcctgtctaaaactgcaatgccccagacaaactttcatccccactttgggaggcaaggtgggaggatcccttgaagccagaagtttgagaccagcctgggcaacatggcaacaccccttagcttgtgtcacctaccacctgctgggttctatggttttcttatcctgtttattccctgtaatggtggaattgtgtcccccagaaagatgtgtttgagtcctaatccccagtatctgtgactttatttggaaaaagggtctttgcagatgtaatcaagttaagattaagtcatactagattagggtgagctctaatccaatgactgaggtccttataagaagaggtaagccagagccaggcgtggtggctcacacctgtaatcaccaggaggcggtggttgtggtgagccaagatcgcgccattgcactccagcctgggcaacaagagcaaaaccccgtctcaaaaaaaaaaaaagaagaggtgagccgggcacggtggctcacacctgtaatcccagcactctgggaggctgaggcgggcagatcacgaggtcaggaattcaagaccagcctgaccaacatggtgaaaccctgtctctactaaaaatacaaaaattagccagacatgctggcacacacctgtaatcccagctactcaggaggctgaggcaggagaatcgcttgaaccgggaggcggatgttgcagtgagccgagattgcaccactgcactccagcctgggcaacagagcaagactccatctcaaaaaaaaaaaaaaaaaaaaaaaaaaaaaaaagtgaactggctgggcatggtggtgactcatgcctgtaatcccggcagtttttttgaggcgaaggcaggcagatcgccttgaggccaggagtttaagaccagcctagccaacatggcgagaccatgtctctactaaaaatacaaaaatttgccgggcatggtggcacatgcctgtaatcccagcttcttgggagactgaggcacgagaatcacctgaacccaggaggcagaggttacagtgagccgggatcccgccactgcactgcagcctgggcttctgggtgacagagcgagactctgtctcaaacaaatgaacagaaaaagaagaaaggaatttggacacaaagacacaggtagtgggtctcctatctatataagagaacagcatgtaatgacacagaggcacacacagaaaagaaggcgagttgaagacagaggcagagaatgggtttatgctgccgcaagccaaggttggagctgccggcagccggaaaaggcaggaaagaattcttcccaagagccttctgaggaagcacggccctgccaacaccttgatttcagacttctaacctccagaactgtaagaaaaagaaattctgtgttctaagccacccaggtttgtggtagtttggtaagtacttttaaatgactgaatgaatagaaagaactcagaacacaacatggaaactaaacctcagatctggtcttcctctgtaaaaggtagcatctgggagaagggcctaaagccacgttttcccactggaggccctggacccacacaacaggccgcgcctgtcctccgactgtggtgccagtcagaactgccctcaggcagaccacagagtctactcctctcccagcctttgcaccccttgtggcccatttttgttctcagagagccccgcgttgtgtgtaaaaagcaaggtgcttaggtggaccaagagatcttcagccaggaggcaatctggcaatggcccagatagaaacagttacagttggagctagacaacgatcgtgccttgtgcgttttctttgactattttcgtttggtttcctgcttattttcaataaaatgtttttgtagcatttgaccttggtccagtgatgctaaggaggaagggagtgggctttaaattttgtcttccttgggccagagttttaaagaggaatcagcttacccccgagggccaggtgatgggggagggggcagtgtgaatggaaaggagaggagctaaggggaagatgaaaggttggggctcaaaaccagctgccctccctgtctgagcatctctctctctgaaattactttctgatcaaaggtcagtgcaatttgtgtttagtctgaacctgaggaatttttcctttagaagctgcaactgccaaagccttagttagccagctgtgctgctgaaagagcaaccaccagggacattccccagagggaatcgaggtcccttcttcctggaaagtttcctgaaacatgagatgctatgatgatgatgatgatgataacgacgacggtcgtggtcatggctaacatatgctgggcatttttctatgccaggcaggcagtgtttgtctgagcatcttcccctgtcagcttgtgagctgggtcctagtactactccccttttgcagatgaagaaactgcccatggccacagcccactgaagatgaaaccaaggttctctgtctaaagctgttgattaaaaataataattaaaaaattaaaaattggccaggcacagtggctcacgcctatctgtaatcccagcaccttgggagaccaaggcaggcggatcacttgaggccaggggtttgacaccagactgccaacatggtgaaactctgtctctattaaaaatgcaaaaatgagccgggcatggtggcacacacctgtaatcccagctactctggaggctgaggcaggagaatcatttgaagccaggacgtggaggttgcagtgagttgagatcgagtcactgcactccagcctgggcaacacggcaagattctgtctcaaaaaaaatttaaaaattaattttaaaaaatttgtgaagacgggctgagcatagtggctcatacctgtaatcctaccactttgggaagctgagttgaggggatcacttgaaaccaggaatttgaggctgcagtaagctatgattgcaccactgcacttcatggtggcatggtggacatcgttactttctggaccagcttctgggccggcatgggtggacatctttccaggaatatactctgagtgtcagtgagacactgtcttaaaaaaaaaaaaaaaaaaaaagaaggtaaggttgagaccatgggcagtagtttgaccccaggctcttcaacatgagttgcctttgtacagaacaacgcagaaataaaaccatgtggctctggaccatagctaagatgctgagatccctggctgaagatctcgtgacctctgcaggagcagaacaaatgtggtggcagtggcaggggctcacccagatagtcattcctcttctggttgatgttcaggatctctctgatatggtcaacagctgtcttgggagagccacccatattggactttcctagaacaaagagaataaagaattcttctaggtaatatcaggatttccccaggccctggaagagtaggaaagcatttagcctgggaacctcaacatttacattgcctgtgagagcttcaaaatatacttttaggctgggcatagtggctcacacctgtaatcctagcactttgggagaccgaagaaggcggattgcctgagctcaggagttccagaccagcctgggcaacatggtgaaaccctgtctctactaaaaccacaaaaaattagccaggtgtggccgggcatggtggctcatgcctgtaatcccagcactttgggaggccaaggcaggtggatcacctgaggttgggagtttgagaccagcttgaccaacatggagaaaccgcacctctactaaatatacaaaattagccgggtgtggtggcacatgcctgtaatcccagctactcaggaggcaggagaatcgcttgaacctgggaggcggaggttgcggtgagccaaaatcgcgccattgcactccagcctgggcaacaagagtgaaactccatctcaaaaaataaaaataaaaattagccaggcatggtgacacatgcctgtagtcccagctactctggaggctgaggcacgagaattgcttcagcctgggaggcagaggttgcagtgagccgagttcgcaccactgtagtccagcctgggcaatagagtgagaccctgtctcaaaaaaataaatatatatatatatatatatatatatgtatgtatacatatatatatatacatacatatatatatatacacacttttactgaaatgttctacattccaggcaccaggccaggtgcttcctatactttaactcatttaattctcatgaaaccccaggtagagtgggtatcctcattttatatactaagtcctggaggaactgtgtaatttggacaatagcaagaggcaaatgacaaggccagatccactacagactgttccttgcatccgtgcccttcgacattcctgctcaagagccacgtttcctcatctatctccaagttacctcccagatggtaacaagagctaacacagagcactttcacacaggcaacttaaatagctttccataaaaattgtgtaaggaaaggaggacagccatcatgatcatcattgctgtcattgtggttacggtcatcatcatcaacactaattctatttatttatttattttattttgagacaaggtaggatcttggtctgtcacccaggctggagtgcagtggcatgatcttggctcactgcaacctctgcctcccaggttcaagcaattctcctgcctcagcctcccaagtagctgggattacaggcgcctgccaccacacccagctaatggttttgtatttttagtagagacggggtttcaccatgttagccagtctgatctcaaactcctaacctcaagtgatccacccgctttggcctcccaaagtgctgggactacaggcataagccaccacactggccctattttataaataagaaactgggccaggtgtggtggctcatgcctgtaatcccagcactttgggaggctgaggcaggaggattgcttgaagccaggagtttgagatcagctgggcaacatagcaaggccccatctctaaaaacaaaaacaaaactggggcccaaagtggaaggcagagggagaatcagaattcagggcttctgaccccatattggtgccccttccactattccagacacactcagagaccatgatacccaccatctgtcagaaggatgatggcatgtcggatttcctgccaggccatcgtttccatgccgaggagtcgcatttggttgttcatcatgagatagacactgtttaaggctgcataggtgttagtcccagttccattttcatgatctggaatatgccaaaaggaaggactctcttagaaacttcccacctaccacctaggggtagggaatcactctattcccccaattattggaaatgcaatttttttttttttttttgagagagtctcgctctgccacccaggctagagtatagtggcgtgatcttggctgactgcaacctccacctccccagttcaagtgattctcatgcctcagtctcccaagtagctgggattacaggtgccagccaccatgcccagctaattttttgtatttttagtagagatggggtttcaccatgttggccaagctggtttcctgacctcaagtgatccgcccatctcagcctcccaaagtgctgggattacaggcatgagccactgcacccggcctggaaatgcaatttatcgattgttttgataaactcagacatttgccattcagatagagatgtggcatcattgcttgttcaaactttaaaagcctttccaccttagaaatgttcattgcatagggccgggcaaggtggttcacgcctgtaatcccagcactttgggaggctgaggtgggcggatcacaaagtcaggatcacgagaccagcctgaccaacatagtgaaaccccatctcaactaaaaatataaaaaattagccaggcatggtggcaggtgcccgaaatctcagctactcgggaagctgaggcaggagaattgcctgaaccctggaggcagaggttgcagtgagccaagatcgtgccactgcactcaagcctgggtgacagtgcgagactccatctcaaaaaaaaaaaaaagaagaagaaaaaagaaatgttcattgcataaccccaatccaagaccacactaaagtcccaagattcaaagatgaggtttccaaaaccttgagtggcttcagccatttgctaagtgccaaccaggcactttacatggtgtatgggtggctaatgacatggggagatggcagtgtgcagccatgcaaaccagacagtgtggttttggcaactggaaggaattgaagacctgcacagtgtctttggacctgcagcatctcagaatgagctatgagctgggggcagctggactcccccaccataaccctggacgttgaaactaccccagactcgtgggactcaggtgccaccaagaggcctcactctctttttaactcatccagaatttgtttgcaggccctgagagggtccatcttctcctctctcatcaccatcacgtgatgacacccgtacctttatagttggcattttccaggctgctgatcacctcagtcatatcccgggagttgtcgttcaggacagacatgaggactttgggctctgaggcaaaggtgataatggcaacgctcacattgatctcaaagctgaagatctgtgcggggcaagtgagaggcagcgtaaagggccctgaagccaaaggggagatggtaagagagcaaacaaagggccctggaggaggcagagaaactggagtgagaccgacagaggcaaggaccaggggagacactaggaaatggctgttaggaagaagctaggggctgggcgcggtggctcatgcctgaatcccaacactttaggcaggtggatcacctgaggtcaggagttcgagaccagcctgaccaacatggcaaaacccatctctactaaaaatacaaaaattagcctggtatggtggcaagcacctataatcccagctactcaggaggctgaggcagaagaatcacttgaacccaggaggcaaagtttgcagtgagctgagatcgcaccactgtactccagcctgggtgacagagactctatctcaaaaataataataataataataataaaaataaggaacagcagcagctaaggaagaaacctttgttgaacatctttctctttgacagactctcttcactccaccctgtgaggggcatgatgacccctattttatggataaggaaattgaggtatgttgccttgtcccccttcccccatcacaccatgaggaggaggtggaagtgggatctgaatgtgtcacatgattctcaatcactgctccaactggtgtgtgttgccgcctcgcagtgcaatgagttacttaattttgagtcccaagagagcacagaaactgccctctttaaaatgtagctgggagggaaaaccatctataatgttacatgaagtattgtgaaaagcacaattacaaaacaaagttctggcgaggaacttaaaccagtggcttccaaacttctatcacacatattttattttattttattttattttatttatttttttgagacagagttttgctctagttgcccaggctggagtgcaatggcgtgatctcagcccactgcaacctccacctcccggatccaagcgattctcctgcctcatcctcccaagtagctgggttacaggcgtgcgccatcacacgtggctaattttgtatttttagtatagacagggtttcatcatgttggtcaggctggtctcaaactcctgacctcaagtgatccacctgcctcggcctcccaaagtgttgggattacaggcactagccaccatgcccagtctatcacacacattttaaagcctgcacaaaatgttgaagttttaaaaggaaattattaaatattaaattattaatctgatttaaattattccacaggggcaccagtatttttctgcttcactcctgtgggttatctcactacctttctgtggagaccactgttctagatgatgaattcctggaaagtaagacctcagcctttccatctttgctgtcccccagccccagcacagtgtcccaacagtgcttgtggaataaaaattatgattgtataaattgaattcatgattcctacatggcatgagtataatctgagaagacttcttggaggaggtgggctgtgagtggggttctgaggaggggaaggagacagagagagatagtgagcacaggaaggcctctgctgcaggcagactcctgattcctgaccctgtccaccatgagggaggcgctctccttgaagatgagaaagtcattttccgacacactctgcgaacagtccaggagcaggtagaggttcagatgaccagagcgctggatttggattttacggcccaggctttctggagaaatgtggaaggggaggattcagatccccacctccttcctgcgctctcgccaagcaggtccagcttctctgcctccctccctttcagtggctgagcccaccaaggctcctggcctccaggaaggttgcatcctcccttgctccggcccagatccagcaccctgctcaaccagaaaccccacctcaaacactcaccctttgtcttctgggtgggattggtggccccaagcatgtgggagaaggaagtgcccagggcaggggccacgtcctcagggaagtcataagagtagggttctgtggggagagccacacaggagtcagccggggcagtggccgggtgtgccgaggaatctcaggagggcagggcagctactcacggcggcagatgggctccgttccactccagaccccgttgccctggcactcccgctccgaagaccccgtgagcacaagattcgaggagcagcgatagcggaccttgtccccatgaccaaagcggaagcctgtccgcactgcgcccagtgaaatgcctgggttggggcagtggccagctgcgagtgaacaaaggaaggcagaggtgagtagccccctcccatcaggctctgcctcctcagcggcctcagttgccagcagaagcttcccagttccaacccagggatgcacccatgtctgtcccagagcccccagagacccagggaagaagtcagctgatggtccctccactccttcagagaacatttatatttcataaaccacagtgaggcatccctacacacccatcaaaacggctaacactgaaacaacaggtaattccaagtgttggagaggatgcagagcgactggcactctgttaccttgctggcatgtacgtgggtgaaactttctcagcctctactacaactaaacatatgccagcctgtgatgtgacaattccacatttagatcatttactcaagagaagcaagtgcatacatgtaccaaaatcacatgcaagaatgttcctagagctccctctccctcaccctctccccatggtctccctctccctctctttccacggtctccctctgatgccgagccgaagctggacggtactgctgccatctcggctcactgcaacctccctgcctgattctcctgcctcagcttgccgagtgcctgcgattgcaggcgcgcgccgccacgcctgactggttttcgtattttgttagtggagacggggtttcgctgtgttggccgggctggtctccagctcctaaccgcgagtgatccaccagcctcggcctcccgaggtgctgggattgcagacggagtctcgttcactcagtgctcaatgatgcccaggctggagtgcagtggcgtgatctcggctcgctacaacctccacctcccagcagcctgccttggcctcccaaagtgccgagattgcagcctctgcccggccgccaccccgtctgggaagtgaggagtgtctccgcctggccacccatcgtctgggatgtgaggagcgtctctgccctgccgcccatcgtctgagatgtggggagcacctctgcccggccgccccgtccgggatgtgaggagcgtcgctgcccggccgccccgtctgagaagtgaggagaccctctgcctggcaaccgctccatctgagaagtgaggagcccctccgcccggcagccgccctgtctgagaagtgaggagcccctccgcccagcagccacctggtccgggagggaggtgggggggtcagccccccgcccggccagccgccccgtccgggagggaggtgggggggtcagcccccagcccggccagccgccccgtccgggaagtgaggggcgcctctgcccggccgcccctactgggaagtgaggagccactttgcccggccagccactctgtccgggagggaggtgggggggtcagccccccgcccggccagccgccccgtccgggagggaggtggggggatcagccccccgcccagccagccgccccgtccgggagggaggtgggggggtcagccccccgcccggccagccgccctgtccgggaggtgaggggcgcctctgcccggccgcgcctactggaaagtgaggagcccctctgcccggccaccaccccgtctgggaggtgtgcccaacagctcattgagaaggggccatgatgacaatggcggttttgtggaatagaaaggggggaaaggtggggaaaagattgagaaatcggatggttgccgtgtctgtgtagaaagaggtagacctgggagacttttcattttgttctgtactaagaaaaattcttctgccttgggatcctgttgatcggtgaccttacccccaaccctgtgctctctgaaacatgtgctgtatccactcagggttgaatggattaagggcggtgcaagatgtgctttgttaaacagatgcttgaaggcagcatgctccttaagagtcatcaccactccctaatctcaagtacccagggacacaaacactgcggaaggccgcagggtcctctgcctaggaaaaccagagacctttgttcacttgtttatctgctgaccttccctccactattgtcctgtgaccctgccaaatccccctctgtgagaaacacccaagaatgatcaataaaaaaaaaaaaaaaaaaaagaatgttcctagagctttactcctaatggccccaaactggaaataatccaaatgtccatcaggaggggaatggataaattgtaatatacccatataatggaatactacacagcaataaaaaagaacaaagtactgatacacacaacagcatggataaatctcacaggcagaatatagaacaaaggatgccagaagcaacagaccacatcccgcatgattccatttacaggaaatgtaagcacaaggtacctagtccatggagacagaggtcagaagagcagttaccttgtgggaggggacaagagggaacctcattctgtcttgggtggtgattagatgagtggatgcattgtaacaaatcattgagctgaatagttaagatttgtacattttacaataggtaaattatgcctcaattttaaaataagttagagtcacgtctaataattcaagcattacttatcacagtcttaccaggcatctacttcaccctcctacagaataaatggccatttgccaaaacccaagggcatgagtggggatccatggtctgggccactaggtgaaggtggtcctgccatcttgtggactccgtgtcttctgtatgatgtgctaagaaccatgatccaagaagctcccaaacccacaggcaaatgcagctccagggaatcctaggagccctacttctgccaagcagagcccctcaccattcacaggggcagcaataactatgacaaaagtgcttatggccaggcgtggtggcacatgcctgcattcccagctactgaggaggctgaggtaggaagatcacttgagctcaggagtttgaagccagccttggcaacacagcgagatcctgtctcttaaagaaacaaaaacaaggccggatgccgtggctcacgcctgtaatcccagcactttgggaggccaaggtgggcagaatcccctgaggtcaggagtttgagaccagcctggccaacatggagaaaccctgtccctactaagaatagaaaattaccgaggcatggtggcgcatgcctgtaatcccagcttcttgggaggctgaggcaggagagtcacttgaacccgggaggcagatgttgcggtgagctgagattgcgccattgcactccagcctgggcaacaagagctagactccgtctcaaaaaaaaaaaaaagtgtacatggcatttatcagattccaggggctgttttttttgttttttgtttgtttgtttgtttgttttgagacagagtctcactctgtcacccaggctggagtgcagtggcacgatctcggctcactgcaacctctgcctcccaggttcaagtgattctcctgcctcagcctcctgagtagctgggattaaccacgcccagctaatttttgtatttttagtatagacgaggtttcaccacgttgaccaggctggtctcaatctcctgacctcaggtgatccacccacctcagcctcccaaagtgctgggattataggcgtgaggcaccgaggctggcatttttttttttttttttttttttgagacagagtcttactctgtcactcaggctggagtgcaatgatgcaatctcggctcactgcaatctccacttcctggttcaaatgattctcctgcctcagcctcctgaatagctggtattacaggcatgcgccaccgcacccggctaatttttgtatttttactagagacggggtttcaccatgttggccaagctggtctcaaactcctgaccttgtgatccaccccccttggcctcccaaagtgctgggattacaggcgtgagccaccgcactccagggctgttgtatatgcttactaatgtcaactcatttaatccagatggcaatctcaggtcagcactcactatccttgtcttacagatgggaaaactgagggctagaaaggttaaatagccttcccaaagtctgtcaaagtcagagtagggcttggaacccaaacctggctttaaaggcaaggcattaaagcacagtacttgactctctcccagcatatcttccctacaacaatctgtggggcctgaatatgaagtcttgctttgaggcacttagaaaagccaggcagagtgtgtggaggctttatgctacatctgaagcttagcaccagctgcctggggcctggcccttgcagacttgtgatgtgtgacctgtagacctcaatttaccaaaatccaggaatattattatggcacactgaacaacagactcctatccccacagaggcttcctggatgcacattgggccccagggttccccaggagaccccagccccctgtgtagcccatcagccagagaactcacccccattatcacacacagctgtttctccatcccacatgccgttggggcgacactgacgcacaggcgagccccgcaatatgaagccatcctcacactcgaagctcacattgccacccacgggataggaccccagccgtggggtataaatgccattctcaaaggagacaggggctggacagcgcacagctggagagagaggaagtgggtggggaatataggactggatggataacacctgggctggggattaagcaggtgattttatgctggaatgcatgggaatggtcaactggctgtcaaaacactgaaatattaggttgcaacatgtgaaattgctgtttttggcaactgattgaatattgccaatttcacagagtctaagcgaactgattgataaatagccacttccctcagtctcctgagggccgtggcctccccagacactccccttgggatcctcagatgtctagaggactccaggaccattcagcatctgttctgaatggtcactactaggcagtcaattgtacataaaaagtcatccctggctttagtaccccacagtctccatcaagacctgttcccaattccttgctactggcaattgacattttctggatattttgaaaagccctctgcaaaagcaactttgccatctagtcaggttaagtcccaccctgagcaactcctaaacaaaagttctggggtggcccctggtgtagcaccctgagcaaagcccacagggagcctcacgtttgcagaccgccttagacagagaccgggtggctcctggggtctgccactgtccgctgctcttgcacagccgtgatgctggggatgggtacaggccctgggggcaggagtaggtgagaaggctcccaggagcccagccatggctgagggtgaaggtgccacccgagatattcacgttctgagggcaggagggagccgagtctgccagacctagagccgtgggaacaaggagacagcaatggagaaagaaggaagacacagatgagaaaaggaaagcaaaagagactgtttcacacatgggaattcaagctgggagcaccaacctcacacacaggaccctgacgttcccccttccctgcctcctacctgggtacaggaacagcaggcaaaaaagaaccatcagtgggcccatggtgtcctccctaggggcggcgagaggtagagagccgcgggagggaaaaggtcatctgacttcccgaaaactagagctgggtcagcagctgcttcattgctgccagagaagaaaaaccagggagtggcaagggggatggtcttctgttagggaaataataagcagggattggggactgaactgaagggtgaaacctttgccctgtctccctgatgctaatatatctatagggtcaatagatctcccccacaggctttgtgtactgcccccacgctccacccacccatgcgtgcacatgtgcaccatacacgcatgctcacaaacacgcaggcaaacacatatttgggctcgtgtgtgcacacatgcaccttgctcttgtgtgaatagtcaatagtctaaagcacacaaacccacaaaccatccaagatattgcaaaatatttcatttaagtaaagttttagtgttcttttgggttgtaccaagtgggttttacttcctgagagcctagaacagttctgtcttcttgaagataaacttccgaggggggtgaaactaatttttttagaacttcttgataaataggaagattgacaatacttttttattccctacaatccttccctagagataatctaggtggaaaaaatgaaatcaacacttagttttggagacaggaaaaatgtttacaacatttttacggaaagtctagtagatgaaattcccaactggcaaagtaaatacatttggggttggttactcaaaggaataaaacttttgcgggggctgggatatgcctttaaatcataacctacacttgtatgaaatgcaggaagcaaagaaacttgaagctagtgtgttagtctccctgacccacagaagtcttttcaatacctttttgaacaatgtagggtaaaaataaataagaccaataaaaaaatgaacatgaaacctctctgaagtgatcatttaggttcgtaaaaacccttttgatttataagtgagtccttagagaactgattgaacctagaagatggaggttgcagtgagccaagattgtgccactgcactccagcctgggcaacagagtaagactacatctcaaaaagaaaaaaaaaaaataagaccgggcacagtgactcacgcctgtaatcccagcattttgggaggctgaggcaggtggatcatgaggtcaggaatttgagaccagcccggccaacatggtgaaaccccgtctctactaaaattacaaaaaattagccgggtgtggtggcaggggcctgtaatcccagctactcgggaggctgaggcaggagaatcacttgaacccgggaggcagaggttgcagtgagccaagatcatgccactgcattccagcctgggtgacaagagcaagactctgtctcaaaaaaaaaaaaaagagtacacaaattgagactccccttggacagggctaagtgcatgaaaatcaggacatcctggtgttagggactccaaagtggctgctgtggcagagctgctagtgcctcccctgcccctcaagtatcttttctccctccttccacagtaagagatggttaggggaacacacagtcacccagctaaagaccatatttcctagcttcccttgcagctaggtagccaggtgacttggttctggctaatgggatgttagtagaacttatgtatgtcatttccaagttatgtccctaaaataaaaaggcagtgtgccttttcttttcatgggctggaatataaacctagcggagatccgtcttccaccaggaggatgagggcaacatgctggggatgacagagcaaacagacagaggagcctgggtgtctgacacagtgttgatgtcataccagccctgcacagccacttagattgttacaagagagaaataaactatcgtaaaggtggggggtatttaaggatgttcacaaatactgtagccttgtcttctttcaatcacatggtaggataggatttccccagccacttgttttagccaataagatgtgagtacaagtgatatgtatcacttcctgatggaagctcaatgtagtcttcaccctgctcttcccctctgtatggtaacgtctgagatggtggctgctccaccagccaagatccctgggtgatatcgaaagcacagtaccagccgggcacagtggctcacacctgtaatcccagcactttgggaggccgaggcagggggatcacctgagttcaggagttagagaccagcctgaccaacatggtgaaaccccatctctactaaaaatacaaaaattagctgggcgtggtggcatacgcctgtaatcccagctgctcaggaggttgaggtaggagaatcgcttgaacccgggaggcagagattgcagtgagccgagatcacaccactgcacttcagcctgggtgacatagggagactctgtctcaaaaaagaaaaaaaaagcgcaatactcggctgactctcagtggataagtaatatgaccaaaaaataaacctttgttattttaattcattgcatttctactaatgcaggaaaaaaagtacccacccaatatgtaggaaatttaaaaatgatttattctttctcatattggccagaaggttcttctgctgatcttccatgcagcggcagtcagctaggggctgagttcagttaacagtaggacagcaggtccttcctccctagccctcatagcatggcagtctcaggacaacttctgaggaatccaaaacataagctgcaaggtctctcgaggcctagccccaaaagtcacataacatcacttctgccacattctattggtcaaagcaaatcacaaggtcagcccagatttaagactggaggcatagaatttacctcttgataggaggaatggcaaagtcacacggcaaaggggcaggcacatcagaataggagagattgatggctatattttgtaagccctcctatggcaacaaatatttctaggttgttggttaccagaacgtaatgaagcctaacctgactgaacattcaaatcactaaactttgggtgccttttaaagccatcaaactaatatgtaacagctgccttcaaaagaaagggcctttctttcatgagtttttcccagtatttgttgagctacatcaacttggcacagtgtggcagaattcattctctcttcctgcttaagtaataaaactcccaagttttctgggcccacagagtatgttcttaaggagaagtgtttactcctcaatgtataaaacttcttcccttcccaccagctggaatgtggacagaatggtggactctggaacagccacctagatcacaaaatggaagtcacatgtggatgatgataaagaaacaaaattaaagaggccctgctctccaatcctgtagagctaataggattgacctggaccacttatgctcagaccatttaagctgctgttattctagcttggttataacaaagccaaaccatgtctaactgatatacctagcaagaaatcaatgtgagagccaaaggcaacactcagagaagtgtgtttattaggatacacgttaaacttctgtaataaagagaccctaaaatacagtaacttaaataagatagaattttgctgcactttcaaataagagcctcagaggccgggcgcggtggttcacgcctgtaatcccagcactttgggaggccgaggcgggtggatcacaaggtcaggagatcgagacaatcctggctaacacggtgaaaccccgtctctactaaaaaatacaaataattagccgggcgcggtggcaggcgcctgtagtcccagctactcgggaggctgaggcaggagaatggcaggaacccgggaggcggagtttgcagtgagctgagatcgcgctactgcactccagcctgggagacagagcgagactccatctcaaaaaaaataaataaataagagcctcagaggccgggtgcggtggcttacgcctgtaatcccagcactttgggaggccgaggcgggcggatcacgaggtcaggagatccagaccatcctggctaacatggtgaaaccctgtctctactaaaactacaaaaaaaaaaaaattagctgggtgtggtggcggcgcctgtagtcccagctactcgggaggctgaggcaggcgaatggcgtgaacccgggagatggagcttgcagtgagcggagatcgtgccactgcactccagcctgggtgacagagcaagactccatctcaacaaaaaaaaaataaaaacaaaataagaggctcagggtaagcagacaaggctgagatggcgtgtgtggccctggctggcagagctgctcatcagcctccttcaggcctccagcttccttccatctgtggttcatgcctttggaaattgtccttgtctgcatggttgaaacagggtctccatcaagtctgcctcccaccccactcttccattcatattccattggcaaaaagtcagttatagtccactgtcagctctccaggaggcccagtcgaatgtggaaggaccatgacctgacctgtggggctaaagatgccagacctttattcccctcggcactcccgattagcttttcagtagaccccaccagatgagggcgaccttggcttctctatttcttgtaccattcaaaagcccagcaaatgtaaccgtgttttcactccaggtagagggaagcaggtgaataatatctaaaaaacagacatgcctctcctgccagcttcttccatcttgtccaaatttcttcttatcaattctaggcttctaatatctgcttccaagggtacaattccaaagagaaaaaaccaataccccaattctgtacttcatctcctagtcagagttggatttttgcttttggtttttttggttttttgtttttgagacaaagtcttgctttgttgcccaggctggagtgaagcagtacgatctcggctcactgcaacctccacctcctgggttcaagggattctcctgcctcagactcccaagtagctgggattacaggcatgtgctaccatgcccagctaatttttgtatttttagtagagatggggtttcaccatgctggtcaggctggtctcaaactcctgacctcaggtgatccacctgcctctgcctcccaaagtgctgggattacaggtgtgagccactgtgccaggccccctaatcagagtttaaaaatcagaaatgatgctctgatggcctctcaggatgccttattctcccctggagagctcagcaccttgcagctgaaaatttctgaggaaacgtggcatatagcagaggccgaccccactctagtggccagtctactccttatccagtctggccacttgggcctggacttcgcggtcatcctaggatctgccacccctcaaccttctatggcaactgcaggtcaacccccaaattggaaaactagtctggcttggcctggttcacagccttaatgtgtgactttagatggggattcagcattgctctgcaagcctcttggtggttttagtggatctgtccttgccccaccatatcccttgggccttatcactggggtgctccactgacttccagctgcagcatctctgtctctacccaaggattgtttttggtgtcctgcaccatctgtgcacagaaagctggaaatgacagagaattaaggccttcaaccaatgactgattggtataaatactgggctccctcaccctggaccatgggataactctgcaccactccagggttcctgagtgggattgacctccactcacccacaatggtaaatttgcctgataacacacccttcattgactgccttccttctctatcacactccactacccatgtttcttgcgatcacctccagaatgcactgtctgcactggaacccttgtctccaggtctgcttctgggggaggaagacttcatattagcaggacatagtgccagacagtatttttaagtcttaaatgtaggtgctcacttaatcctcacagcaagcttatgacacaggttctgttgttactcccactttacagatgagggaactgaggcacacaaaggttaagtgagctgccccaggttcatacaggtactaagcagcagagccgggattcaaacccaggcagcatggctcctgggtccacactcatagccaccaagtggtagtgcctcttcctcacgtcttctctttagtgactgctgggagctccttgcgcatccctgaagtctaccccagccccttgcatttccaagccctctctcccctaggctctttcctcttggcaccccctctcccataacaccttcttttccatccttctcaaatccctcatcttccagactcctacaagacctgtccacgccatttcccaccttctagctacttgtgcacttgtctcaagctccccagaggaaggatccaggagttttttttttaaacaatgagctatccaagtaaggtcaagccaatgccctcccccatcctatttccaccccaagtaaatagcatctttcaggtcagcaacagaattggctttggtttctcatccatttcttttttaataaaaatatttacattgggtcagaccccacccatttccacacaaaggcctctgctaagttcctcggtacccacaccatcccccatcctagcaggcactgcctactaactttgaagtgattgcccaactatgatcttgaggaatctccacatacatcacccttagagcctcagaaagggttttgccctgccccatggggctcctccccatgcccaggctcttccagggccctgggcctcagaggccaccctgcaggcccagacactgggttagacactgaacctcctgtccttgtccatccattgcacaaacaattcctgagaatggaacgaggaactaaggggtggggtagggcctcccaagaaacagaaggcctgtccctgacctcctgtaggcgccatatctctttcagacaaaaactcaacctctaaagactcacaggcctggggtgtaccagggtgtccatctgcccacaccgcagctcttacctcagccctctgaggtctccactgtccttgggctggtggggggcatggtgcatgttatcacccacttcttgctacccatcagggaagctgccctgggtaacccaggtaagagggtggtaaacacaactcaggtgctcaggggtcagctgaggatgggccagggggaggggtggcctatggctgaattgccctggctccggtcctcaccaccccaaccccagctctgggcttagcattggtggcagtgggggcctcactagcctcctctgccctttcattgaaaattcctctctaatgttttcctttatcctggggagtggggagatattcatccccttcccagttctgggtaccagtaccctcttgacaaaaggatagcctggggctcacatgggagaatcctcctgccctcactcctccagtgctgccaaggggtgaagagggaacttgcccagtagaaagacatacgttcatgccttgctttcctgcccaacacaaatgaaaggttatacctgagaagagctcctcctgccccgtctctggccccagccccagtgtggtatgaggaattcaggctttgacttaagacagcctggaacctcaggtttggcttggcaaattcattagctatttcgtagccttactcaccctgttttgtcacctgtcatccacagaaccaacagcaaaatacactccccttaaggttacctttgagaattaggaccatcaaaaggagaagatcggctaccctacaggtataaaaggtaccaggatatttgctttagcattcactgttaccaagaggaaatgtttggaaactcccacgtccattaataggggacagacacagcacattgtggtatggggacaactgaatactacgcagtctctgcaagcttaaggcttatctgtgtgtacagagctgaatgtctccagatatatatgttatataatatacacttttaaactagatagacattcagaactgtatgtatgggatgccaccatttatgcaaaaaaaggagggaaagaggatagtagccacatatgctctctgtgtgtatataatttcactggaaaagtttacaaaaaactggataggagagttgcctctggggagaactgggggctggaaaatgaggtgggaggtaaagaaggcaacttaattttcaccaaatcccctttattactccttgtagttttcactgggtacatatgatacctattcaaggccaggcccagtggctcacgcctgtaatcccagcactttgggtggccaaggcaggtggatcacctgaggtcaggagtttgagaccagcctgaccaacatggtgaaatcccgtctctactaaaaatacaaaaattagccgggtgtcttggcaggcacttgtcatcccacctactcaggaggctgaggcaggagaattgcttgaacctgggaggcagaggttgctgtgagctgagattgcaccactgcactccaacctgggcaacaagaacaaaactccgtctccagaaaaaaaaaaaaaagaaaagaaaagaaaagaaaagaaataccctactggactattaacaagagaccctgatacaatctctctgcagattaagttttattttgtaaaatttcaaacatattgtaaagtagagagaatagtaaaatgaactttcatgtatgtatccatcatctagcttcagttcatagacggtctcggttcatagacggtctgggttcatgtctatataccacccaccaaccattccttccaggaattttttttttttttttttttttgagacagagtcttgctctgtcacccaggctggagtgcagtgatgcaatctcggcccactgcaacctctgcctcccaggttcaagcctcctgagtagctgggattacaggtgcccgccactacacccagctaatttttttgtatttttagtaaaaatggggtttcaccaacttggccaggctggtcttgaactcctgacctcgtgatccgcccacctcagcctcccaaagtgctggaattacaggcgtgagccaccgctcccagccaggatttttttttttttttaagttaaagacagggtctcactgtcacccaggctggagtttagtggtgcaatcacagctcactgtaaccacaaactcctgggctcacatgatcctcccacctcagccttccaagaagctgggacaagaagcatgcatcaccatgcccagctaatttattcatttatttacttttgtaaagacaggggtctcagtatgttgcccggactggcctcaaactcctagcttcaagtgatcctcctgcctcagtctcccaaagtgttaggattacaagtgtgagccactgtgcctggcctcgaggaatattttttttttgagatggggtcttgctttgttgcccaggctggagtgcagagacctgatcatagctcacggcagcctcaaactcctgggcttccacaatcctcccacctcagcctcctgagtagctgagattacaggcatatgccatcataccaggctaagttttttttaattgtttactttaattagagatgaggtcttgctatgttttccaggctggtcttgaactagcctcaagcaatcctccaacctaggcctcccaaagtgctgggaattcattaaaaatttttttacggaaaagctcaaatttttcattttaaaatatttctcttttttcttttttcagaacatttctcacttacataagagcacattttctttctctttttttcagatagagtctctttgtgtcacccaggctggagtgcaatggcgtgatctcggctcactgcaacctccgcctcccgggttcaagcaattctcctgcctcagcctcccaagtagctgggattacaaacggctgacaccacgcccagctaatttttgcatttttagtagagacggggtttcaccatgttggccaggctggtctccaactcctggcctcaggtgatccgcctacctcagcctcccaaagtgctgggattacaggcatgagccaccgcgcctggcctttttttctttttttaaaattccaacttttattttagatacagggggtacaggtgcaggtttgttacatgggtatattgcactaggtagtcatagaaccaattaggtaattttttaacccacactccctccctctctccccttctagtagtcttcagtgtctattgttcctatatttatgtccatatgtgctcaatatttagttccgttataagtgagaacattaggcatttggttttctgttcctacgctaattcatttaggattctgtcctccagctccatccatgttgctgcaaaggacatgatttaattttttttttttatggctgcaaaactatttatctttcacttcttggcttttaccaaaataaaatgtttcttttgaactataaatttataaaacatctcattgttctctgtatcataatttttttctttttttttttttttctgagacagagtctcactctgtcacccaggctggagtgcagtggtgccgtcttggctcactgcaacctccgcctcctgggttcaagcgattctcctgcctcagcctcccaagtagctcggattacaggtgcccaccagcacgccggctaatttttgtatttttagtagagacgaggtttcaccatgtttgccaggctggtctcaaattcatgatctcaggtaatccacccgcctcggcctcccaaagtgctcagattacagacatgagccaccacagccagccttttttttttttttttttttgttgagatggagtctcgccctgtcacccaggctggagtacagtggcgctatctcagctcactacaactccagcctgggcaaaaggagcaaaactctgtctcaaaaaaaaaaaaaaaaagggcagagaactaatgcccagagtcaacctgcaattattgcagagtgggaagcagtagacagatgctcctgcctcctgtccttcaggtggaaagcgtctggagacattcagctctctcctcaggagggcctgggggaatcgaactccactgcacacaacagtgacatcactcttttttttttttttttttttgagacggagtctcactctgttgcccaggctggagtgcaatggtgcaatctctgctcaccgcaacctccgcctcccaggttcaagcaattctcctgcctcagcctcccaaatagctgggatgacaggcacatgccaccacgccaggctaatttttgcaattttagtagagacagggtttcgtcgtgttggccaggctggtctcgaactcctgacctcaggtgatccacccacctcagcctcccaaagtgctgggattacaggcgtgagccaccatacccggccaacatcattctcttaaactggcctttcctccttcaggatctcacactccctatagcctcgcttctgctttctgggatcacctaaattaactacctatggccaagtcctgtctcaagctctgctgtcagggtcaccaaaattaagatcatccctttccatcctcctctccctataaactactgcccttcttccacaaactccttccacgccagcaaacccagactgtaacattaacacagagttataatccatccatatactggtctctccacattcctggagcacaaactgctaaagggtaggaacgctgtgacacgtttggttcccccactgtccagtgggagagagatatgtgagccagtcagcgctacaccgagttgaggcagccattgaggctcttcatgaattttcccgttttctgccttccaggcacatgataggatggaattcctcagccctcctgaagttaggccactgcaagaggcctaactggcttgctttggccagtgaaataagagcagaagtcacatgtgttgttactgtcaggcacaagtatttaactgccaatgtaacacaagacactccagcaccctcttttgatggagcctcctttgatc

SEQ ID NO: 538 - DNA, 2953 bp, Homo sapiens
caaagttgtacagatttctatattttggatgagaaatttttcttctctctataataaatcgtttcttatcttggcattttaatcaatctcttgtcatgattatagaggtttagctaaaagtattttttcttagaagacaggttctataaactgaatatctgttgcacactggtcatgctggaaaaacatttgatgaggaatgaagatgctctgtatatacatgtttaggttttacaggaaacacaggagtagcatgttttaaaaatttctaaagtcaaaacatggacacattcacaggctaatgatctcatgaaataaggataagagaccacggtagcatctaccaaaaatgtgatactcaaaggattacatttcattgcttccctgttgaagtgaagatataaatgttccattctgacccacctttgaaaaacaattactttgccccatggattctttgttcaattagaaatttccccggggcaggtgacccatagtcttaaagaacaggctaaacaccacagagagattggttgctttttgcttttcatcacctgcaagatgtacataaaaatcacataagctggaattcaacaaaaggtatgtttatgaacttttattctcaaaagttgaaatgctgactttctcgattcctcattttcagacttttatttcagataaatactaaaaacctaagtgaaccttgataatgctgtagtgtagattacttcactaccccatataatagaaggacttgctgtttagttgtagaggataacagcgtttttcagtggaaattgaaagtggaaaaattgaattttgctctacacagttaacatatagtggcctttttttggtatatatgtaaacatgttgacactggaaatacgcagtctgaaataaaattagtaattacttgaaattagtaatctcaaataacttttaagaagttatttctacacccaggaataaattattctgattttgtagacaacacaggaataggccactgaatatgcaggtatttagagtacaaatgtctgtggatattattggcacaccattctcgagagttagaattcgtagacccgcaacacatggactacccttgccaattgttatggttttatttttaaacctattctgtgaaaaagctcctcggtatttcaaacttgaattacaataaaaacaccaggtagggttgtttttaaatgggtctcaccccagtgctgactactgttgtttaccaactacatttcatctggtaactccattgaaactaagtacctcaaccattttttttttttatcataaagccttttttcaaatggaaagttgtttttgaagatcttgacatcagactttttcaatctttgaaaatgatggaaacagttaataaaaatgtttattttagaattcaggtgatgtctggcttgtgaggagctgtttataagtttgtctttgaaaaaggcttgcacacatcactctgagaccagctgtttcctgtgactttaaccttaccttccccagacaattgagctgaacctgtatctgcggtacagtagctgtttgtgatgtatttcttgttcactgtttctggggaatgttttgaaatattttattataaatccttttaagataggatgactactttcaaaattattgttgcctttggcaccaggaattcatagttgtgattggcagtaagtttgaggagtgttactttctaagttttaacaggtagttttgaaattatttccttttttccaaatttaagtagtgcctccctctgtaatgttgaaacaaggcttcaagtggattgtatagcaagagttaccctggttcatgcaggataatgcggctgttatctttgtcatctggaatgggaatctcatgtctttatccttatgtgcaatatttctataataatagactggaaaggccaccagaaagtggctttcaggtacattgcacaaatagtttccttaagtcattataactcacacattgcaagtaattaattttgttttgtataggtgttgcagtttatgaaattggccttcaagttaaaaggaaggaagccgtattcccgatggctagtgtttaatgactacaggtttccaggctccctttaatcttgggagcaaataaatctactattggacttctccctgcgtgacttttaacatttctgatactctctcttcttcctctttacagaagagaggtatgataactgaagttgtactttgcatattgaagtttaaagatacttcctctccccttttcacccctatttcaaatgatgtgataaaatcctcttgataggctatatggagaacatttgtcaatagttttatctatgcatggaagtcttcaaaaagtatatcttggattgtctaaaactgaatagatttcttatttatctgaaggtatacagactgccaacattttagacttatctctcagtctctgccactgaacttttatatatggctgctatcaaaatataaccggtttattttcatatttggaactaatataacagtatcacaaaatcttttacagtaagatagtttgtaataccagccgacccagctgcttaactgagtccttaaatcatttaatatatgggactgtaaatagagaaatctgtacattatgagatctgatttctggttatgcctatagatctttattttctttatccctatagatcattttcttctgatgttaagtgttatatttttgaaatgctcctaaacaagtaagccttagattgtattaatcctgaggattgataccatttcctcaacactttgtggagtatgattgacaccagtttttttttgactgcaggtttaacttggcttatcacttttcgtattgctcagtatgtccaagataggaataaaaaaatgtagttcaaaaaaaaaaaaaaaaaaaaaaaaaa

SEQ ID NO: 539 - DNA, 1681 bp, Homo sapiens
atgggaaaaaaacagaatggaaagagtaaaaaagttgaagaggcagagcctgaagaatttgtcgtggaaaaagtactagatcgacgtgtagtgaatgggaaagtggaatatttcctgaagtggaagggatttacagatgctgacaatacttgggaacctgaagaaaatttagattgtccagaattgattgaagcgtttcttaactctcagaaagctggcaaagaaaaagatggtacaaaaagaaaatctttatctgacagtgaatctgatgacagcaaatcaaagaagaaaagagatgctgctgacaaaccaagaggatttgccagaggtcttgatcctgaaagaataattggtgccatagacagcagtggagaattgatgtttctcatgaaatggaaagattcagatgaggcagacttggtgctggcgaaagaggcaaatatgaagtgtcctcaaattgtaattgctttttatgaagagagactaacttggcattcttgtccagaagatgaagctcaataattgttcacattgttcttttatatatatttatatatatatattaaaaattgggtcttagattttgatttactagtgtgacaaaataactacatcctaatgaaaatcaagtttgatatgtttgttttgaaagtagcgttggaagagttgttgggggttttttgcatccatagcactggttactttgaacaaataataaaagctttctgtagttgcttcctttatcagaaaagaacatttgataccatggtatatcatttcctcttcattaaagaacagcttttctaaatgttgggggaaatgtccatagtcattactcagtcaaaacttgtgttctcatgagcctaaggaccattctagatttattacgtgttttttgtgtgtgtgtgtgtgtgtgtgtgtgtatccataaaatgcatatgtaaatttttttttgtttttaagcattcacccaaacaaaaaaatcacaggtaaacccatgtttctgagatgccattattccaagcaaaataagagataatcccttcaagttaaattgaaaattttcctgaaaccatacatttcaagtgaaataagtaattctagataggacaatttaaattggataattttaaagagtctataattgcagtggtttatttgcaaaattcctaaaaggaaaaattttatcactgccatcacagcaggtttcctcatccagatgaggaaactagacaaatgctagtgtgttttaactagctaaacaaaactaagttaaatgaacatttaaaagtttccctagcgggccattccttagcaaaatgttggaatccctgttgctacattgactaaaaggtcatgatgaatggaatatgtaagacttggctcatagaaacctaatcagatggttagaggtgttggcagtttaggacctgctgtcataaatgtgtgaacaaccttttgtaacctaacctattgacctgcatgttttttctttaccccaattcattacatggaggctcaatcttgagtttgctttactggttcagcaaaagccaggaagaacaactttgtagtaatcaaaatgttatccaactgtatattgtttactttattgtaaatactggtgaacagtggttaataaatagttttatattcctttaaaaaaaaaaaaaaaaaaaaa

SEQ ID NO: 540 - DNA, 2966 bp, Homo sapiens
ggatcctttctggaatggaggtcttatgagctgctattgaacacggcagagcctgttggtgacctgcacacaggagccctccagtcagtactgattgaattactcaaggctgcctctctgcaaagttgagcactacaggacgtcgggactgggcatttccttccaacatggccgccactgcctctccgcagccactcgccactgaggatgccgattctgagaatagcagcttctattactatgactacctggatgaagtggccttcatgctctgcaggaaggatgcagtggtgtcctttggcaaagtcttcctcccagtcttctatagcctgatttttgtgttgggcctcagcgggaacctccttcttctcatggtcttgctccgttacgtgcctcgcaggcggatggttgagatctatctgctgaatctggccatctccaaccttctgtttctggtgacactgcccttctggggcatctccgtggcctggcattgggtcttcgggagtttcttgtgcaagatggtgagcactctttatactattaacttttacagtggcatctttttcattagctgcatgagcctggacaagtacctggagatcgttcatgctcagccctaccacaggctgaggacccgggccaagagcctgctccttgctaccatagtatgggctgtgtccctggccgtctccatccctgatatggtctttgtacagacacatgaaaatcccaagggtgtgtggaactgccacgcagatttcggcgggcatgggaccatttggaagctcttcctccgcttccagcagaacctcctagggtttctccttccactccttgccatgatcttcttctactcccgtattggttgtgtcttggtgaggctgaggcccgcaggccagggccgggctttaaaaatagctgcagccttggtggtggccttcttcgtgctatggttcccatacaatctcaccttgtttctgcatacgctgttggacctgcaagtattcgggaactgtgaggtcagccagcatctagactacgcactccaggtaacagagagcatcgccttccttcactgctgcttttcccccatcctgtatgccttctccagtcaccgcttccgccagtacctgaaggctttcctggctgccgtgcttggatggcacctggcacctggcactgcccaggcctcattatccagctgttctgagagcagcatacttactgcccaagaggaaatgactggcatgaatgaccttggagagaggcagtctgagaactaccctaacaaggaggatgtggggaataaatcagcctgagtgaccaaattttggtctggtgggaacagatgggaaccagctcaattgggtgtccactcaaagtgctctctccaggggcctcagtgactgtgttgctaaacccagtggtcagttctcagttctcagccatcagcagcatttgctcgccccgccttcttcctccactttcttcacttgcttccaggataccacgctttcttttctgaattgctacaatctttcttccttccttccttgcttccttccttccttccttccctctctccctccctccctccctcgcttcttcccttcctcctttcctcccttcctactttccttccttccttctgacagggtcttgctctattgctctgtcacccaggctggaatgcagtggcgagatctccgctcactgtagcctcctccccctgggttgaagcaattctcatgcctcagcctcccaagtagccaggactataggcacctgccaccatgcctggctaatttttgtattttttttctttctttctttcttttcttttttttttttttttgagacggagtctcactcttgttgcccaggctggacaacaatggcgcgatctcggctcactgcaacctccacctcccggattcaagcgattctcctgcctcagcctcctgagtagctggaactacatgcgcgtgccaccacgcacagctaatttttataattttagtagagatggggtttcactgcgttggccaggatgatctcgatctcttgaccttgggatccacccgccttggcctcccaaagtgctgggattacaggtgtgagccaccatgcctggccctaatttttgtgtttttattagaaacagagtttcaccatgttggccaggctggagaattgctgtaatagttttccaactggcccctgtccttcctctctcttgctctcctcccatctcatctgcacctagcagccagagtgatcctgatactctcggcctttacttccgcctccctcagagcagcagcctgtcaaaacaccagattacaacaaatttagtttaaaggtctcaattagcgttattggcaattctagaatcaggcaacagactcattgaatcaggaacagattcactccataaaatacagagagtgctgcaatgagctgggtagaagaggttagttttatagacaggaaggggctgtcaaaggcagaaagaaatgaagaacaaaaaaaaagattgatttttttttttttgagacaggatctcactctgtcatccaggctgaagtccaatcccacaatcatggctcactgcagccaccacctcctgagctcaagtgatcctcccatctaagcccccaagtagctaggactacaggagcacaccaccacacctggctaatttttgtattttttgtggagacagggtctcagtatgttacccaggttggactggaaacccttggctcaagcaatttgcctgcctcagcctcccaaagtgctgggattacaggcgtgagccactgcacagggccagattcatcatttcaaagttactttctatatgcggccggaacagggtggttgacatcagttttcttcaggttactttttaataatgattaaaacggggaacttcattatcaaaaaaaaaaaaaaaaaaa

SEQ ID NO: 541 - DNA, 2074 bp, Homo sapiens
ccacgcgtccgggctcggggaggtttccgctgaggcggcgggggtgcggcggtgggctggtcttccgcggccggcgttgcgccgcggcggagggtgggcgcgcggggagcgggatggagccggggctgtgaggccgaggcggcggtgcctgggaggaagggtcggatgccggaccgggggcaccgctgaggcggtgggtccccgacctgcgagacaggtttggaagcccccgctgcgcccagtccgtgcggaccgcgaggtcgcgggcgggtggaggcgcgtctccggcacgatgaaggatttgggggcagagcacttggcaggtcatgaaggggtccaacttctcgggttgttgaacgtctacctggaacaagaagagagattccaacctcgagaaaaagggctgagtttgattgaggctaccccggagaatgataacactttgtgtccaggattgagaaatgccaaagttgaagatttaaggagtttagccaacttttttggatcttgcactgaaacttttgtcctggctgtcaatattttggacaggttcttggctcttatgaaggtgaaacctaaacatttgtcttgcattggagtctgttcttttttgctggctgctagaatagttgaagaagactgcaatattccatccactcatgatgtgatccggattagtcagtgtaaatgtactgcttctgacataaaacggatggaaaaaataatttcagaaaaattgcactatgaattggaagctactactgccttaaactttttgcacttataccatactattatactttgtcatacttcagaaaggaaagaaatactgagccttgataaactagaagctcagctgaaagcttgcaactgccgactcatcttttcaaaagcaaaaccatctgtattagccttgtgccttctcaatttggaagtggaaactttgaaatctgttgaattactggaaattctcttgctagttaaaaaacattccaagattaatgacactgagttcttctactggagagagttggtttctaaatgcctagccgagtattcttctcctgaatgttgcaaaccagatcttaagaagttggtttggatcgtttcaaggcgcacagcccagaacctccacaacagctactatagtgttcctgagctgccaacgatacctgaggggggttgttttgatgaaagtgaaagctctgttgcccaggctggagtgcagtggcccgatctcagctcattccaacctccacctaccaggttcaagcgattctcatgcctcagcctccggagtagctgggattacagctcctggacctgaagcagacctgcagagaggatcaagtgcagagacaagctgctgctgagatcatcataggggacctcttctaacatatgagttcctgaggaagtgctgtgaccttccaatgctgccactggtagtctcatttcaaagagtaaaatgtgaaaatccaatggcagcagctattgtgatatgccagacagcaggaattgggactaaaaatcaagggatacttgtgataatagatccatagtactttggagctggaagaaacccagcttcaaaaaacagcttgatttgcagctcttcattcaaaaagaatcccatccagggtatgacattgaacttactcatcacgtctctatagtgtcttctggagtttggaactaagacccctagacagcagagcctaagggaggaatgactctaccaggagacaaaataatgactctgttaaagttgagatggccggctgcctcatacctctgattcaaaagtaaaggagttgctgtactggttagggcgattgttcctgacaaccaaggggaaactggactgctacacaaggaggactgaacagagctgaggcttccctaatgaagacattctgctgtggtcagaagtttcagcagcccctgagttcctgcctgttcctcctgaaagccttccctatctgtggataatgggcttgccttgccaacttccacaattgcataaaacaagtccttgcaatgaatctcaacatgtattaaaaaaaaaaaaaaa

SEQ ID NO: 542 - DNA, 553 bp, Homo sapiens
  misc_feature (20)..(20): n is a, c, g, or t
  misc_feature (27)..(27): n is a, c, g, or t
  misc_feature (261)..(261): n is a, c, g, or t
  misc_feature (265)..(265): n is a, c, g, or t
  misc_feature (317)..(317): n is a, c, g, or t
  misc_feature (428)..(428): n is a, c, g, or t
  misc_feature (458)..(458): n is a, c, g, or t
  misc_feature (494)..(494): n is a, c, g, or t
  misc_feature (536)..(536): n is a, c, g, or t
acttcattcacttgcaaatnagtgtgngcccacaagagccagctctcccgagcccgtaaccttcgcatcccaagagctgcagtttcagccgcgacagcaagaacggcagagccggcgaccgcggcggcggcggcggcggaggcaggagcagcctgggcgggtcgcagggtctccgcgggcgcaggaaggcgagcagagatatcctctgagagccaagcaaagaacattaaggaaggaaggaggaatgaggctggatacggngcantgaaaaaggcacttccaagagtggggcactcactacgcacagactcgacggngccatcagcatgagaacttaccgctacttcttgctgctcttttgggtgggccagccctacccaactctctcaactccactatcaaagaggactagtggtttcccagcaaanaaaagggccctggagctctctggaaacagnaaaaatgagctgaaccgttcaaaaaggagctggatntggaatcagttctttctcctggaggaatacacaggatccgantatcagtatgtgggcaa

SEQ ID NO: 543 - DNA, 1207 bp, Homo sapiens
tccagttaggagccttgatgccggaggggacagtgggtcgccgagagcgcccggagggaaccgcctggccttcggggaccaccaattttgtctggaaccaccctcccggcgtatcctactccctgtgccgcgaggccatcgcttcactggaggggtcgatttgtgtgtagtttggtgacaagatttgcattcacctggcccaaaccctttttgtctctttgggtgaccggaaaactccacctcaagttttcttttgtggggctgccccccaagtgtcgtttgttttactgtagggtctcccgcccggcgcccccagtgttttctgagggcggaaatggccaattcgggcctgcagttgctgggcttctccatggccctgctgggctgggtgggtctggtggcctgcaccgccatcccgcagtggcagatgagctcctatgcgggtgacaacatcatcacggcccaggccatgtacaaggggctgtggatggactgcgtcacgcagagcacggggatgatgagctgcaaaatgtacgactcggtgctcgccctgtccgcggccttgcaggccactcgagccctaatggtggtctccctggtgctgggcttcctggccatgtttgtggccacgatgggcatgaagtgcacgcgctgtgggggagacgacaaagtgaagaaggcccgtatagccatgggtggaggcataattttcatcgtggcaggtcttgccgccttggtagcttgctcctggtatggccatcagattgtcacagacttttataaccctttgatccctaccaacattaagtatgagtttggccctgccatctttattggctgggcagggtctgccctagtcatcctgggaggtgcactgctctcctgttcctgtcctgggaatgagagcaaggctgggtaccgtgcaccccgctcttaccctaagtccaactcttccaaggagtatgtgtgacctgggatctccttgccccagcctgacaggctatgggagtgtctagatgcctgaaagggcctggggctgagctcagcctgtgggcagggtgccggacaaaggcctcctggtcactctgtccctgcactccatgtatagtcctcttgggttgggggtgggggggtgccgttggtgggagagacaaaaagagggagagtgtgctttttgtacagtaataaaaaataagtattgggaagc

SEQ ID NO: 544 - DNA, 2351 bp, Homo sapiens
tgcgggcaggattcacgccgctgtgacccggaggtcctcagggggcgaagccccggcctaggcctcgcggagatgcccagctgcggtgcttgtacttgcggcgcggcggccgtccggctcatcacctcctcactcgcctccgcgcagagaggtatttctggtggtcgcattcatatgtcagttttaggaaggcttgggacatttgaaactcagattctgcaaagagctcctcttagatcctttacagaaacaccagcatactttgcctcaaaagatgggataagtaaagatggttctggagatggaaataagaaatcagcaagtgagggaagtagtaagaaatcaggctctgggaattctgggaaaggtggaaaccagctgcgctgtcctaaatgtggcgacttgtgcacacatgtagagacctttgtatcatccacccgttttgtcaagtgtgaaaagtgtcatcatttttttgttgtgctatctgaagcagactcaaagaaaagcataattaaagaacctgaatcagcagcagaagctgtaaaattggcattccaacagaaaccaccacctccccctaagaagatttataactacctcgacaagtatgttgttggccagtcatttgctaagaaggtgctttcagttgctgtgtacaatcattataagagaatatataataatatcccagctaatctgagacagcaagcagaggttgagaagcagacatcattaacaccaagagagttagaaataagaagacgggaggatgagtacagatttacaaaattgcttcagattgctggaattagcccacatggtaatgctttaggagcatcaatgcagcaacaggtaaatcaacaaatacctcaggaaaaacgaggaggtgaagtattggattcttctcatgatgacataaaacttgaaaaaagtaatattttgctgcttggaccaactgggtcaggtaaaactctgctggcacaaaccctagctaaatgccttgatgtcccttttgctatctgtgactgtacaactttgactcaggctggatatgtaggcgaagatattgaatctgtgattgcaaaactactccaagatgccaattataatgtggaaaaagcacaacaaggaattgtctttctggatgaagtagataagattggcagtgtgccaggcattcatcaattacgggatgtaggtggagaaggcgttcagcaaggcttattaaaactactagaaggcacaatagtcaatgttccagaaaagaattcccgaaagctccgtggagaaacagttcaagttgatacaacaaacatcctgtttgtggcatctggtgctttcaatggtttagacagaatcatcagcaggaggaaaaatgaaaagtatcttggatttggaacaccatctaatctgggaaaaggcagaagggctgcagctgctgcagaccttgctaatcgaagtggggaatcgaatactcaccaagacattgaagaaaaagatcggttattgcgtcatgtggaagccagagatctgattgagtttggcatgattcctgagtttgtgggacggttgcctgtggtggttccattgcatagcctagatgagaaaacacttgtacaaatattaactgagccacgaaatgctgttattcctcagtaccaggccttattcagcatggataagtgtgaactgaatgttactgaggatgctttgaaagctatagccagattggcactagaacgaaaaacaggtgcacgaggccttcggtccataatggaaaagctgttactagaaccaatgtttgaagtccctaattctgatatcgtatgtgtggaggttgacaaagaagtagtagaaggaaaaaaggaaccaggatacatccgggctccaacaaaagaatcctctgaagaggagtatgactctggagttgaagaagaaggatggccccgccaagcagatgctgcaaacagctaaactgtcatattgctgtcttgtatatacagcttttccttcttttgtttaggatcataattgtctctacagtctgatattaaaggcattggatctatcttggatatcatacatggtcagagaagcctttaggagaagaatcagatcatgtatataattgtaacatcacattgattttacggaagatgttatatggactttaatgacacaatgtttagagataaaatgtacattattttggttcagttttttaaaaaaaatatgctttaacaaaattcttaggaattcttttaagcaatgcaggtattgcgataactgtagattttacaataatgttactctacaaatgggaaaataaattctttaaaattgaatattga

SEQ ID NO: 545 - DNA, 2393 bp, Homo sapiens
aggacaccaaggaccgcctgggccggacgaatgcgagattttggacatcatcatgaaaatgtgctcttgctgtgaatgcaagtgcggccccatcgacctcctgttcgtgctggacagctcagagagcattggcctgcagaacttcgagattgccaaggacttcgtcgtcaaggtcatcgaccggctgagccgggacgagctggtcaagttcgagccagggcagtcgtacgcgggtgtggtgcagtacagccacagccagatgcaggagcacgtgagcctgcgcagccccagcatccggaacgtgcaggagctcaaggaagccatcaagagcctgcagtggatggcgggcggcaccttcacgggggaggccctgcagtacacgcgggaccagctgctgccgcccagcccgaacaaccgcatcgccctggtcatcactgacgggcgctcagacactcagagggacaccacaccgctcaacgtgctctgcagccccggcatccaggtggtctccgtgggcatcaaagacgtgtttgacttcatcccaggctcagaccagctcaatgtcatttcttgccaaggcctggcaccatcccagggccggcccggcctctcgctggtcaaggagaactatgcagagctgctggaggatgccttcctgaagaatgtcaccgcccagatctgcatagacaagaagtgtccagattacacctgccccatcacgttctcctccccggctgacatcaccatcctgctggacggctccgccagcgtgggcagccacaactttgacaccaccaagcgcttcgccaagcgcctggccgagcgcttcctcacagcgggcaggacggaccccgcccacgacgtgcgggtggcggtggtgcagtacagcggcacgggccagcagcgcccagagcgggcgtcgctgcagttcctgcagaactacacggccctggccagtgccgtcgatgccatggactttatcaacgacgccaccgacgtcaacgatgccctgggctatgtgacccgcttctaccgcgaggcctcgtctggcgctgccaagaagaggctgctgctcttctcagatggcaactcgcagggcgccacgcccgctgccatcgagaaggccgtgcaggaagcccagcgggcaggcatcgagatcttcgtggtggtcgtgggccgccaggtgaatgagccccacatccgcgtcctggtcaccggcaagacggccgagtacgacgtggcctacggcgagagccacctgttccgtgtccccagctaccaggccctgctccgcggtgtcttccaccagacagtctccaggaaggtggcgctgggctagcccaccctgcacgccggcaccaaaccctgtcctcccacccctccccactcatcactaaacagagtaaaatgtgatgcgaattttcccgaccaacctgattcgctagattttttttaaggaaaagcttggaaagccaggacacaacgctgctgcctgctttgtgcagggtcctccggggctcagccctgagttggcatcacctgcgcagggccctctggggctcagccctgagctagtgtcacctgcacagggccctctggggctcagccctgagctggcgtcacctgtgcagggccctctggggctcagccctgagctggcctcacctgggttccccaccccgggctctcctgccctgccctcctgcccgccctccctcctgcctgcgcagctccttccctaggcacctctgtgctgcgtcccaccagcctgagcaagacgccctctcggggcctgtgccgcactagcctccctctcctctgtccccatagctggtttttcccaccaatcctcacctaacagttactttacaattaaactcaaagcaagctcttctcctcagcttggggcagccattggcctctgtctcgttttgggaaaccaaggtcaggaggccgttgcagacataaatctcggcgactcggccccgtctcctgagggtcctgctggtgaccggcctggaccttggccctacagccctggaggccgctgctgaccagcactgaccccgacctcagagagtactcgcaggggcgctggctgcactcaagaccctcgagattaacggtgctaaccccgtctgctcctccctcccgcagagactggggcctggactggacatgagagccccttggtgccacagagggctgtgtcttactagaaacaacgcaaacctctccttcctcagaatagtgatgtgttcgacgttttatcaaaggccccctttctatgttcatgttagttttgctccttctgtgtttttttctgaaccatatccatgttgctgacttttccaaataaaggttttcactcctcaaaaaaaaaaaaaaaaaaa

SEQ ID NO: 546 - DNA, 1696 bp, Homo sapiens
tgaaagacctcgaatgaatgcgaattctctgcttgcaagccctactggacttagtccttatctccgatttggttgtttgtcatgtcgactgttttacttcaaactaacagatctctacaaaaaggtaaagaagaacagttcccctcccctttccctttatgggcaactgttatggcgtgaatttttctatacagcagcaacaaataatccacgctttgataaaatggaaggaaaccctatctgtgttcagattccttgggataaaaatcctgaggctttagccaaatgggcggaaggccggacaggctttccatggattgatgccatcatgacacagcttcgtcaggagggttggattcatcatctagccaggcatgcagttgcttgcttcctgacacgaggggacctgtggattagttgggaagaaggaatgaaggtatttgaagaattattgcttgatgcagattggagcataaatgctggaagttggatgtggctgtcttgtagttccttttttcaacagtttttttcactgctattgccctgttggttttggtaggagaacagatcccaatggagactatatcaggcgttatttgcctgtcctaagaggcttccctgcaaaatatatctatgatctctggaatgcaccagaaggtatccaaaaggtagccaaatgtttgataggagttaattatcctaaaccaatggtgaaccatgctgaggcaagccgtttgaatatcgaaaggatgaaacagatctatcagcagctttcacgatatagaggactaggtcttctggcatcagtaccttctaatcctaatgggaatggaggcttcatgggatattctgcagaaaatatcccaggttgtagcagcagtggaagttgctctcaagggagtggtattttacactatgctcatggcgacagtcagcaaactcacctgttgaagcaaggaagaagctccatgggcactggtctcagtggtgggaaacgtcctagtcaggaagaggacacacagagtattggtcctaaagtccagagacagagcactaattagaaaacattcaggaggaatactgttgcagctgaaattggtggggagttcaatacttttcaattaagttatttaaaaatattcttcattgatggaaagcagttacatattgaaatatgttgtttctaatgacatttctgtggtttttaactttttaatgaatttcacagagtacaattggtaatttgtatataaagaacttggcaaaagaatttgcttaatgtaaatataaacagtcacaattagtatagacccatcgatatatttttgataatttttcatgtatggtaaagttaaaatgacaaattgatattctgatataaaactcaaagttttgaagtcagtgggaaaaaaggaggtttttagactttcttaaaagacgttaaaattttaggacagaattttcttgatgttgtttgatctaactttgcactctttgataataatgttttagataatgtgcgtaatccaaattggtattgtagcctctgttaacacagacagtatatgttttaaactttgatgtaaacctttttagacccaaacttgtggaagtatcatgtgttaagttctctgtctctgtttctttgttcatttattactaaaatgaacttgttattaaagtatatgcaaatatg

SEQ ID NO: 547 - DNA, 1839 bp, Homo sapiens
gagaaaagcaggtggaaggagaggaagcggatgccgtggggtttacagcaggaaaatccgtggagacagcagatccgagaagcggcgatgtttgcgtagaaccctctcttcccttctctctgaccagcaccatgcttctcctggtgacaagccttctgctctgtgagttaccacacccagcattcctcctgatcccagagaaatcggatctgcgaacagtggcaccagcctctagtctcaatgtgaggtttgactccaggacgatgaatttaagctgggactgccaagaaaacacaaccttcagcaagtgtttcttaactgacaagaagaacagagtcgtggaacccaggctcagtaacaacgaatgttcgtgcacatttcgtgaaatttgtctgcatgaaggagtcacatttgaggttcacgtgaatactagtcaaagaggatttcaacagaaactgctttatccaaattcaggaagggagggtaccgctgctcagaatttctcctgtttcatctacaatgcggatttaatgaactgtacctgggcgaggggtccgacggccccccgtgacgtccagtattttttgtacatacgaaactcaaagagaaggagggagatccggtgtccttattacatacaagactcaggaacccatgtgggatgtcacctggataacctgtcaggattaacgtctcgcaattactttctggttaacggaaccagccgagaaattggcatccaattctttgattcacttttggacacaaagaaaatagaacgattcaaccctcccagcaatgtcaccgtacgttgcaacacgacgcactgcctcgtacggtggaaacagcccaggacctatcagaagctgtcgtacctggactttcagtaccagctggacgtccacagaaagaatacccagcctggcacggaaaacctactgattaatgtttctggtgatttggaaaatagatacaactttccaagctctgagcccagagcaaaacacagtgtgaagatcagagctgcagacgtccgcatcttgaattggagctcctggagtgaagccattgaatttggttctgacgacgggaacctcggctctgtgtacatttatgtgctcctaatcgtgggaacccttgtctgtggcatcgtcctcggcttcctctttaaaaggttccttaggatacagcggctgttcccgccagttccacagatcaaagacaaactgaatgataaccatgaggtggaagacgagatcatctgggaggaattcaccccagaggaagggaaaggctaccgcgaagaggtcttgaccgtgaaggaaattacctgagacccagagggtgtaggaatggcatggacatctccgcctccgcgacacgggggaactgttttcttgatgatgctgtgaacctttatatcattttctatgtttttatttaaaaacatgacatttggggccaggcgcggtggctcacgcctgtaatcccagcactttgggaggccaaggcaggcggatcacctgaggtcaggagttcaagaccagcctgcccaacatggtgaaaccccatctggactaaaaatgcagaaatttacccaggcacggcggcggacgcccatcatcccagctacttgggaggctgaggcaggagaattgcttgagcccgtgaggcggaggttgtagtgagccaagatcgcaccattgcacaccaacctgcgtgacagagcaagattgcatctcaaaacaaacaataataataaataataaaaacctgatatttggctgggcaacaaaaaaaaaaaaaaaaaaaaaaaaaaaaaaaaaaaaaaaaaaaaaa

SEQ ID NO: 548 - DNA, 1131 bp, Homo sapiens
atggcactgactgcccacccctcctgcctcctggccctgttggtggcaggcctagcccaaggcatcagaggcccccttagggcccaggacctaggtccccagccgctagagctgaaagaggccttcaagttgttccagatccagttcaaccggagttacctgagcccagaagagcatgctcaccgcctggacatctttgcccacaacctggcccaggctcagaggctgcaggaggaggacttgggcacagctgagtttggggtgactccattcagtgacctcacagaggaggagtttggccagctctatggctatcggagggcagctggaggggtccccagcatgggcagagaaataaggtctgaagagccagaggagtcagtacctttcagctgtgactggcggaaggtggccggcgccatctcacccatcaaggaccagaaaaactgcaactgctgctgggccatggcagcggcaggcaacatagagaccctgtggcgcatcagtttctgggattttgtggacgtctccgtgcatgaactgctggactgtggccgctgtggggatggctgccacggtggcttcgtctgggacgcgttcataactgtcctcaacaacagcggcctggccagtgaaaaggactacccgttccagggcaaagtcagagcccacaggtgccaccccaagaagtaccagaaggtggcctggatccaggacttcatcatgctgcagaacaacgagcacagaattgcgcagtacctggccacttatggccccatcaccgtgaccatcaacatgaagccccttcagctataccggaaaggtgtgatcaaggccacacccaccacctgtgacccccagcttgtggaccactctgtcctgctggtgggttttggcagcgtcaagtcagaggaggggatatgggcagagacagtctcatcgcagtctcagcctcagcctccacaccccaccccatactggatcctgaagaactcctggggggcccaatggggagagaagggctatttccggctgcaccgagggagcaatacctgtggcatcaccaagttcccgctcactgcccgtgtgcagaaaccggatatgaagccccgagtctcctgccctccctga

SEQ ID NO: 549 - DNA, 3042 bp, Homo sapiens
aaaaacgtggcagaggaaaagcccaagttaaagcaacaaatgaatccgaagacgaaatcccacagctggtaccaataggaaagaagactccagctaatgaaaaagtagagattcaaaaacatgccacaggaaagaagtctccagcaaagagtcctaatcccagcacacctcgtgggaagaaaagaaaggctttgccagcatctgagaccccaaaagctgcagagtctgagaccccagggaaaagcccagagaagaagccaaaaatcaaagaagaggcagtgaaggaaaaaagtccttcgctggggaaaaaagatgcgagacagactccaaaaaagccagaggccaagtttttcaccactcctagtaaatctgtgagaaaagcttcccacacccccaaaaaatggcccaaaaaacccaaagtaccccagtcgacctaaagtcagtgattcaactggaaggaaacctcaatgctgcctccagagctttttggaaatactcagatcctggccgcctttgtaaccttctctaaacgtcaggcctggacttaaaagattttttaaaacctccataagtagtccaggggcggtggctcacgcctgtaatcccagcactttgggaggccgaggcaggcggatcacaaggtcaacgagatcgagaccatcctggccaacatggtgaaaccctgtctgtaccaaaaatacaaaaattaattgggcatggtggtggacacctgtgatcccagctactagggaggctgaggcaggagaattgcttgaacctgggaggcggaggttgcagtgagccactgcactccagcctgatgacagagcaagactcagtcgcaaaaataaataaaaataataaaacctccatatgtaatcctgacatatgttcctgggtataatctgtttctaaattgtccttctgtgtatttgctaatgtaatagagggaaaaatagagtgcttctctgtggttgttcagcactttaggtagccaaggtgagaggattgcttgaggccaggagtttgagactagcctgggcaacttggtaaaaccccatctctacaaaagaaaaaaaaaaattagtgtggcatggtggcatgcatctgtgctcccagctcctcacgaggctgaggtggaaggatcaagtgagcgcaagaggttgaggctccagtgagccacgatcaccccactgtgctgtagcctgggtgacagtgtgagattctgtctcagaaaaaacaaagtataacattgctttgcttctgagtatactgttggctttccaaatcagtgggtctgacttgaggtctgtgatgtgacccttttcctcacctgctcaaccattattcacatggactccatcatattcatttgtagtcattcccagagtggcccagtgagggtctcgctgtatgagagtcggctacggaatttaggagaaacagaagtttcttggctttcatgctgagcttgttggtctaagcttatgagtcactggattagcatccatatgggaagggaaattaacatggagtcatttatacagggactaaattgaatcctacctaccggaggcaagaacatgatttatcttccataagccttatcctcttcctccttattcctcagtccatatggatttgcttatgtatgacaactccaaggaatcttggaagagtagattgctaacgtttccacaattgtcaagtatattctgaggcagtaaacacctttttaggtacttggcctttcactggttgtgaattggtatgcatccgtagtagtaagttcacagattcactgcagtgcaggaatgttcttgcatgccaaagactcaactgctttcaaagataatgtgggtgctagatgcagtggcttacatctgtaaccctgttagggtgaccagacccaacaccaggtcgtgggggtgacaaagtccagtggagtcaaaggattgagaaaaagacagtttgagagagaagtaggaccagcagaccatcgggatggtggaggctgtgaaggccgtgagctctgggagcccacactatttattggtaatccaacaaagaaacagatggtgagaatgtgaaggtcagaagggcaccttgcattaagcacatgatttacagctgtgatggtttagcatttgctctgctacttgagataatggagagcaggttcttttaactcaagttacagtcgatcctgggagagcaaggagccagcaagtctagacattccagagccacaggccctggattctatccaagccacgagggattttatgccctgggcttagattatggtgcgtcagggcagccttccaccctttagcacagagcttggtgttccaaagaccacaaggggttttagacccttgaccctggacatattccaagactcttttacattatgtcagaatgcaagccctgcctcagcttctcccaacactcagcttttcgcaacataatcccagcactttggaacgctgggtggattgcttgaacccaggagttcgagaccatcctgggcaatatggcaaaaccccatctttaccaaaaataagctgggtgtggtggaacatgcctgtggtcccagcttcttgggaggctgaggtgggaggattgcttgaacccgggaggtagaggctgcaatgggccatgatcacgatcctgcactccagcctgggcaacagagagagacagtccctggcccactgcccccttccctggcccagtctcaaaaaaaatgaggctgggcgtggtggctcacatctgtaatcccagccaaggctggcagatcacttgaggccaggagttctgagaccagcctggcttacatggtgaaaccccatctctactaaaaatacaaaaactagccaggcatggtgggaggcacctgtaatcccagctacttgggaggctgaagcaggagaatcactttaacccgggaggtggaggttgcagtgagctgagatcacaccactgcactccagcctgggcggcagagcaaaactgaaaaaaaaaacaaaaaaaaaaaaa

SEQ ID NO: 550 - DNA, 11072 bp, Homo sapiens
gagggaaggagggagggaagcagccgctgacccgtggcatgagctggatgcggtgtccgttgcaggactagggcgccgacatgaacctgcaccaggtgctgaccggggctgtgaaccctggcgaccactgcttctccgtgggcagcattggcgaccagcgcttcacggcttatgcatctggatgtgacattgtaatactgggaagcgattttgaaagattacagataatcccaggagctaaacatggaaatattcaagtgggatgtgtagactgttcaatgcaacaaggcaagattgcagcgtcttatggaaatgttatctccatttttgaaccagttaacctaccaaaacaaaagaaaaatttggaattatatagtcagtggcagaaaagtggccaattttttctggaatcaatagcacacaatataacctgggatcccacaggcagtcgtcttttaactggttccagctatttgcaactctggtccaatactaacttggagaagccaactgaagatgaaaatttaaataaaacagatcttaactttggagattggaaatgcatttggcattgcaaaactgcttcccaagttcatttaatgaaattttcaccagatggagaattttttgccactgctgggaaggatgactgtcttttgaaggtttggtataatgtagaaaactggcggacagctgttacttctccagatggaagttcagaaaaacaatcccaaggagaaattgacttttcttttgtgtatctggcccatcctcgagcagtaaatggattttcctggcgtaaaacaagcaaatatatgcctagggcttctgtatgtaatgtactgttgacttgctgcaaagataatgtgtgtcgtctttgggtagagacatttttaccaaatgattgtttgctatacggaggtgactgcagccattggactgaatcaattaatttaacaaataacttcaagagaaatgcttccagtaaagaacgagttcaaaatgctttagaagtaaatctgagacattttcgtagaggtcggaggagatcacttgctcttgtagcacatacgggatatctaccacatcagcaggatcctcatcatgttcacaggaacactccactgcatgccaatgcactttgccactttcatattgcagccagcatcaacccagccacagacattccacttcttccatctattacatctctgagtctaaatgaaaatgaagagaagaccggaccttttgttgtacactggctaaacaataaagaactgcattttactttgtccatggaagtttttttacagcaacttagaaaaagttttgaacaaccatcttctgaggccagtgtagaagattctaatcaggcagatgtaaaatctgatgaagaaactgatgatggtgttgatgatctgaaaataaatcccgaaaagaaggaattaggctgtgataaaatggtaccaaactcaagttttacatcattatcgtcagctgccattgatcatcagattgaagtacttctgtctgaatggagtaaaaatgcagatatgctatttagtattcatcccatggatggttctttgctagtttggcatgtggattggctggatgaataccagcctggtatgtttcgtcaagtacaggtgtcctttgtttccagaattccagtagctttccccacaggtgatgcaaactctctctgtaaaagcataatgatgtatgcctgtaccaagaatgttgacttggctattcagcaggggaaacaaaaaccttctggcctcacccgttccacatcaatgcttatttcttctggtcacaataaatcatctaatagtttaaaattaagtatttttacgcctaatgttatgatgatatcaaaacatgctgatggttctctgaatcagtggctggtcagttttgccgaggaatctgctttttctactgttctcagtatttcccacaaatccagatattgtggtcatcgttttcatcttaatgatttagcttgccactcagtattaccattattgctgacaacatcacaccataatgcattaaggacaccagatgttgataacccagagcaaccttttgatgctctaaatattgaagaatgctctttgacacaacaaaataaaagcactgttgacgtggcatttcaggatcccagtgcagtttacagtgagcttattctgtggagggttgacccagttgggccattgtctttttctggaggagtttctgagcttgcccggattaattctcttcatgtttctgccttttccaatgtggcatggctgcccactcttatacccagttattgtctgggtgcatactgcaactctcctagtgcatgctttgtagccagtgatggacaatatctgagattatatgaagcagttattgatgctaagaaacttttatctgagctttctaaccctgaaatttctaaatatgttggtgaagtctttaacatcgtcagtcaacaatcaacagccaggccaggatgcattattgcattagatcccattaccaaacttcatggcagaaaaacccaactgcttcatgtttttgaagaagacttcattttgaataaccttgagaagaaaagccttggcaaagacagcattttatctaatgcaggcagctcacctaatggattttctgagaagttctacctaattgtaatagaatgcactcaagacaaccgttcactgttacacatgtggaatttacatctaaagtcaattcctgtctcattagatgaaaaagtagatacaaaattatccgaagcggtttggcagccagaagaacattattcttcttctccagagaagatcctatctcctttttcacaaaagtatcaggcttgcagagcaaatctccagagtaccagcaggttgactctgttttcagaaatggtttatagccaagaattgcatttaccagaaggagttgagataataagtattaagccatcagcaggacatctgagttcatcttctatatatcctgcatgcagtgctccttatttattggcaacttcatgttcagatgagaaagtaagattctggagatgcagagtaacagatggagaatctgccacgtcaaagaatggaaaaattgatcttgcatacatttgggaagaatggccattacttattgaagatggacttcagagcaatagtagtataactgtacctggtaggcctgtagaagttagctgtgcacatacaaatcgtttagcagtagcttataagcagcctgcatctaatagtagatcttcccaggactttgtgatgcatgtaagtatttttgaatgtgagtcaacaggaggttcatgttgggtccttgarcagacaattcatttagatgagttaagcacagtattggattctggcattagtgttgatagcaatttagtggcctataataaacaagacatgtatttatctagtaaagagaatatcacatcaaacacaaagcatttagttcacttagattggatgtctagagaagacggttctcatatcctgactgtaggaattggatcaaaactttttatgtatggacccctggctggcaaggtacaagaccaaactggtaaggaaaccctggcatttcctctctgggagagtaccaaagttgtgcccctttctaaatttgtactattacgaagtgtggacctagtttcttctgtagatggctccccaccttttcctgtttctttatcgtgggtccgggatggcatccttgtggtaggaatggactgtgaaatgcatgtgtattgccaatggcaaccatcttctaaacaagaacctgttataacagattcgtacagtgggagcactccatctataacaagtttaataaaacagagtaactccagttctgggttacatcctccaaagaaaactctgactcgatccatgaccagtcttgcacagaaaatctgtggaaagaaaactgcattcgatccttcagtggatatggaagattcaggtctttttgaagcagctcatgtactttccccgactctacctcagtatcatcccttgcagcttttggaactcatggatcttggtaaagttcggagagccaaggccatcttgtcccatcttgttaagtgcattgctggggaagttgtggctctgaatgaagctgaatctaatcatgaacgccgccttaggtctctcacaatcagtgctagtggaagcactaccagagacccccaggcattcaacaaggctgaaaatacagattacacagaaatagattctgttcctccacttcctttatatgccttacttgcagcagatgatgatagctgttactcatctttggagaaatctagtaatgagagtacgttaagtaaatcaaaccaattatctaaagaaagttatgatgagctttttcagactcaacttctaatgactgatactcatatgttagagacagatgaagaaaatacaaagcctagagttattgacctttcacagtacagtccgacttactttggacctgagcatgctcaggttctttctggccacttacttcattctagtttaccaggactcagccggatggagcagatgtctttgatggccttagcagatacaattgcaactacaagcactgatattggagaaagccgagacagaagccaaggtggagaaactcttgatgaatgtgggttaaaatttcttttggctgttcgactccatacctttcttacaacttcccttccagcctatcgagctcaactccttcaccaaggcctgtctacaagtcattttgcttgggcatttcactcagtagcagaagaagaactgctgaacatgttgccagccatgcagaaagatgatcccacttggtctgaactaagagctatgggtgtggggtggtgggtccggaatacccgcatcttacgcaaatgcatagaaaaagtagctaaagcagccttttatagaaagaatgatcctttagatgctgccattttttaccttgcaatgaaaaagaaagctgtgatttggggattatatagagctgaaaaaaacaccaggatgacacagttttttggacacaattttgaggatgagaggtggcgtaaagcagctttaaagaatgctttttctttgctaggcaaacaaagatttgaacattctgcagcattttttcttttagctggttgcctcagagatgcaattgaggtatgtcttgagaaattgaatgacattcagttggctcttgtaatagcaagactctatgagtctgaatttgatacatctgcagcatataaatctattttacgtaaaaaagttttgggaatcgattctcctgtcagtgaactgtgttcattgaacataaatatgcatcatgatccttttcttcggagcatggcatattggattttggaagattatagtggtgctctggaaacattaataaagcaacctatcagagagaatgatgatcaagttttatcagccagtaatcctacagtttttaatttctacaattatctaagaacacatcctcttttgctgagacgtcattttggatcatctgatacattttccacacatatgagcctaacaggaaaaagtggactggcaggaacaattaatttaagtgaaagacgtttattttttaccactgccagtgctcatttaaaagctggctgcccaatgttggctttggaagtattatcaaagatgcctaaagtcatcaagaaaacaagacctttttatagggcttctagttttctggatactagtaaagactgttctccttcttctccattaaagttggatgcaagggaagataagtcttctgctgttgattggtcacagtcactgataaatggttttggatcttcttcagagggttcctcagagaagcaatcaaactccactctttcttttgactggagccaaccaagtgttgtgtttcaggatgactctttagagttaaaatgggacagtgataatgatgaagaaaatgaggatgtccctatttcaatgaaagaactaaaacctttacagagaaaaacagataaaaagttggatgacataagttctaactacacagaatctttcagcacactagatgaaaatgaccttttaaatccatcagaagatataattgcagttcagttaaaatttagagcatgtttaaagattctcacagtagaacttcgtactttatctactggctatgaaatagatggtggaaaattgcgttaccaactataccactggcttgaaaaagaggtgatagctcttcagaggacttgtgacttttgctcagatgctgaagaactacagtctgcatttggcagaaatgaagatgaatttggattaaatgaggatgctgaagatttgcctcaccaaacaaaagtgaaacaactgagagaaaattttcaggaaaaaagacagtggctcttgaagtatcagtcacttttgagaatgtttcttagttactgcatacttcatggatcccatggtgggggtcttgcatctgtaagaatggaattgattttgcttttgcaagaatctcagcaggaaacatcagaaccactattttctagccttctgtcagagcaaacctcagtgcctctcctctttgcttgtacagccaatgccaaaacagtagttgccaatccattattgcaccttagtaatctgacacatgatattctccatgccataataaactttgattcaccaccccaccctgatatccaaagcaataaagtgtatgtaatgcatactttagcagcttcactttctgcttgtatttatcagtgcctttgtggtagtcataactacagttcatttcagacgaatcagtttactggaatggtatatcagacagtactgcttcctcatcgaccttctttgaaaacaggaagcttagatgaagcattaactcccaatacgtcaccagctcaatggccaggaataacttgtctaattcgacttttgaattcttctggcgaggaagcccagtcagggcttacagtcttgctctgtgagattctcacagcagtgtatcttagtctcttcatccatggcctggccacacattcaagtaatgagctatttcggattgtggcccatcctctaaatgagaaaatgtggtctgctgtgtttggtggaggtgcacatgttcctagcaaagaacagacacattcaaaaactttacctgtttcttcactagttgaagaaggagaaaaacagaacaaacgttttaggccgtcaaaaatgtcttgcagagaatctgccccactgaccccttcctcggcaccagtaagccaggagtcactggcggttaaagaaaagttcatcccacctgagctcagtatctgggactatttcatagctaagccttttctaccctcttctcaaagtagagccgaatatgattcasaggagagtctgggaagtgatgatgatgacaatgatgatgatgatgatgttttagcatcagatttccatctccaggaacattctaattcaaattcatatagttggtccttgatgcggttggcgatggtgcaattggtgctcaacaatttgaagactttttatcccttcgcaggtcatgatcttgcagagcttccagttagttcacctctttgtcatgcggttctaaaaactcttcaatgttgggaacaagttcttctccgacgacttgaaatccatggtgggccacctcaaaattatatcgcaagtcataccgccgaagagagtttgtctgcaggtcctgcaattcttcgccacaaagctttactggaacctacaaacactcctttcaaatccaaacaccatctggcactgtctgtgaagaggctttggcagtatttggtgaagcaggaagaaattcaggaaacctttatcaaaaatatattcacaaagaaacggtgtctaaatgagatagaagcagatttgggatatcctggaggtaaagcaagaattattcataaggaatctgatatcattactgcgtttgctgttaataaggcaaatagaaactgcatagcaatcgcttccagtcatgatgttcaagaactggatgtttctggaattctggccacacaggtctacacttgggtagatgatgatatagaagtggaaaccaaaggatcagaagatttcttggttatacatgctcgtgatgatttaacagctgttcaaggtacaactccatatacacatagcaatcctggcactccaatcaacatgccatggcttggtagtacacagactggcagaggagcatctgtgatgattaagaaagccattaataatgttagaagaatgacttctcatccaactcttccttactatctgacaggagctcaagatggaagtgtcagaatgtttgaatggggccattctcaacaaataacctgttttcgatctggtggcaattcaagagttacaagaatgagatttaactatcagggaaataagtttggaatagttgatgctgatggatatttaagtttgtatcaaacaaactggaaatgttgtccagttactggaagcatgcctaagccatacctgacttggcagtgtcataacaaaacagccaatgattttgtcttcgttagttcctcctctctgatagctacagctggtctttcaactgacamtagaaacgtatgtttgtgggatactcttgtagcacctgccgatagtttagtccatgcatttacctgccatgacagtggagccacagttttagcatatgctccaaaacatcagctactaatatcaggtggcagaaaaggttttacatatgtatttgacctttgtcaacgacaacagaggcagcttttccagagccatgattctcctgttaaagccgttgctgttgatccaactgaagagtactttgttacaggatctgccgaaggcaatataaagatttggagtctctctacctttggtcttctccatacttttgtcagtgaacatgctcggcagtccatttttagaaatattggaactggagtgatgcaaattgagacagggcctgcaaatcacattttctcctgtggagctgatggaacaatgaaaatgagaatactgccagatcagtttagccctttaaatgaagtgttgaaaaatgatgtgaaatttatgctataacatttttacaataagatgtacaatttattacctatatggaagtggccaacagatataatatacagtgatcattctctatgccacaaattagctaatgctttcttgtttttatatttattttatggagctttgcccttgatgcactgatgccttaaaaattaacaaggtcattcagaagtagattacattgcctaaagtagaatgtgtaagtaatgctgtaataatacatatcatagtattattataatcagtatgtcatagtgttaaaggtgttttgtttactcaattgatacttttccacaggcatctctgcatgaatttcttccacagtaaaaatacgttttttgtaaaggcaattgtacataatactcatcacttaattcaccacactctcacttcctttattagccttatacatctcaaactcttctcttaattaatgataggtatttgagtaagaatgaaaaaaataatgaacatcttcattaaaattgtcattgagacgtcagtgataaatgagctagatggctcaatatgtaaggttttcagtagtttaccctccggaacccaagttatatgtatgtatacgtgtgtgtgtgtgtgtgtgtgtgtatcttacacatcttatttgaacttagttgtatatattagcgaaaactggtttttcatgtgtttttgtgccataacaactattgccaccagaataacttttttttgcaactgtgcttttcatttttaaaaaatttttgaattcccatcctaattttcaaataagtttcaaggagactatcaggattattattttaaagattagatttagtcaaataagtcttagcaggcaataaagtttctgtggtggcatatatcatgtaagacacttaaagtaagtttgtgaatttgtcaactttcgagcatcaaacaaatattttacttaaattttattttrtcttatttttagtgctttaatctcaaaattctgaaaagcgaatagcagtgttttcagaaacaaatgtgaaagcagtcaaattaagtagatactatttagaaatgtaaaatactctccagatctaccattaatagaagataaactacaccttatattttatttttgccaaaatattttattataaaatatgaccaaaatatttaaaatgcacaatgcttttaacttaaatgtgctaaccctgtttctgtctgttttgtgctgtaccttttctgattcagaattatagaaaacttgataaatacttgattttaaccaatgagactacaggcagatgggactaagtgtttatgggacaattatgtactatttaacttaaatatattttgtttaataggaaatatataataatagcattttatgtaataaaatatgggcaacgattatcttggaaattaaagagtcaaagcaaagaaatgaagggctggtaaaatgaattttgtaatatcctcaggatacttttatcttaaaagtatgttgttaaagattttgtaaattgtatttcaacaattttaaatgtgttgagcaagttgcagtgcaaacactgtcattatgtagagagtttatatgcacatgaataacctgtacctataaatcgtgcaataaccatatgcgactattttgccatggagaaatctgacagcattgcaaacaatagtattgtttgatgtagttaaccttaagttatttttcagtaatttcttcacaaatcaagattcaaacagctttaaacacttccaatgagataaaatatttactattatgcttattagaacaaaaggtgtttaaggatgaactaaatattttaattgagcatttatatggataatcatacattatgtaagcccatatgtatttacatccagagtcataatattttaaataaacaatcatgcagaaacttt

SEQ ID NO: 551 - DNA, 804 bp, Homo sapiens
gtggtgaaatacccccctggcaaagtaattgaaccagggtgtgttcgtgtagttcgaggtgaagggatgccgcagtatcgtaatccctttgaaaaaggtgatctttacataaagtttgatgtgcagtttcctgaaaacaactggatcaacccagacaagctttctgaactagaagatcttctgccatctagaccggaagttcctaacataattggagaaacagaggaggtagagcttcaggaatttgatagcactcgaggctcaggaggtggtcagaggcgtgaagcctataatgatagctctgatgaagaaagcagcagccatcatggacctggagtgcagtgtgcccatcagtaaactctgcaaacaaattgcacaggtggattttctttccacatttgcctgatttgttctcagcaatccagctggagtgtcttatcaatccagatgaactgagggacatctgttggtctatgtataacttttaaaattggtatagtatctacagagtgtataatttaaactaaccacaaagctttacatcttcattttgactgttccatagcagaataaagcacttgaaaggaaacaagactccctttcacacatggattattataagtttcaatcctggtatctgtgcttgatttttatcagttttgtgtagatttttatgtttcatattttaaatttaaatcccacattgtaaagtttgtacaatttgtcctgaagctttgtgtttggctgcacctgcataagctgctacaaatagaataaagaatttcatagcctgtaaaaaaaaaa

SEQ ID NO: 552 - DNA, 3623 bp, Homo sapiens
cagacgccgcggggccaggtcgttgagggtcggcggcgggcgaggagcgcagggcgctcgggccgggggccgccggcgccatgggcaaccgcgggatggaagagctgatcccgctggtcaacaaactgcaggacgccttcagctccatcggccagagctgccacctggacctgccgcagatcgctgtagtgggcggccagagcgccggcaagagctcggtgctggagaacttcgtgggccgggacttccttccccgcggttcaggaatcgtcacccggcggcctctcattctgcagctcatcttctcaaaaacagaacatgccgagtttttgcactgcaagtccaaaaagtttacagactttgatgaagtccggcaggagattgaagcagagaccgacagggtcacggggaccaacaaaggcatctccccagtgcccatcaaccttcgagtctactcgccacacgtgttgaacttgaccctcatcgacctcccgggtatcaccaaggtgcctgtgggcgaccagcctccagacatcgagtaccagatcaaggacatgatcctgcagttcatcagccgggagagcagcctcattctggctgtcacgcccgccaacatggacctggccaactccgacgccctcaagctggccaaggaagtcgatccccaaggcctacggaccatcggtgtcatcaccaagcttgacctgatggacgagggcaccgacgccagggacgtcttggagaacaagttgctcccgttgagaagaggctacattggcgtggtgaaccgcagccagaaggatattgagggcaagaaggacatccgtgcagcactggcagctgagaggaagttcttcctctcccacccggcctaccggcacatggccgaccgcatgggcacgccacatctgcagaagacgctgaatcagcaactgaccaaccacatccgggagtcgctgccggccctacgtagcaaactacagagccagctgctgtccctggagaaggaggtggaggagtacaagaactttcggcccgacgaccccacccgcaaaaccaaagccctgctgcagatggtccagcagtttggggtggattttgagaagaggatcgagggctcaggagatcaggtggacactctggagctctccgggggcgcccgaatcaatcgcatcttccacgagcggttcccatttgagctggtgaagatggagtttgacgagaaggacttacgacgggagatcagctatgccattaagaacatccatggagtcaggaccgggcttttcaccccggacttggcattcgaggccattgtgaaaaagcaggtcgtcaagctgaaagagccctgtctgaaatgtgtcgacctggttatccaggagctaatcaatacagttaggcagtgtaccagtaagctcagttcctacccccggttgcgagaggagacagagcgaatcgtcaccacttacatccgggaacgggaggggagaacgaaggaccagattcttctgctgatcgacattgagcagtcctacatcaacacgaaccatgaggacttcatcgggtttgccaatgcccagcagaggagcacgcagctgaacaagaagagagccatccccaatcagggggagatcctggtgatccgcaggggctggctgaccatcaacaacatcagcctgatgaaaggcggctccaaggagtactggtttgtgctgactgccgagtcactgtcctggtacaaggatgaggaggagaaagagaagaagtacatgctgcctctggacaacctcaagatccgtgatgtggagaagggcttcatgtccaacaagcacgtcttcgccatcttcaacacggagcagagaaacgtctacaaggacctgcggcagatcgagctggcctgtgactcccaggaagacgtggacagctggaaggcctcgttcctccgagctggcgtctaccccgagaaggaccaggcagaaaacgaggatggggcccaggagaacaccttctccatggacccccaactggagcggcaggtggagaccattcgcaacctggtggactcatacgtggccatcatcaacaagtccatccgcgacctcatgccaaagaccatcatgcacctcatgatcaacaatacgaaggccttcatccaccacgagctgctggcctacctatactcctcggcagaccagagcagcctcatggaggagtcggccgaccaggcacagcggcgggacgacatgctgcgcatgtaccatgccctcaaggaggcgctcaacatcatcggtgacatcagcaccagcactgtgtccacgcctgtacccccgcctgtcgatgacacctggctccagagcgccagcagccacagccccactccacagcgccgaccggtgtccagcatacacccccctggccggcccccagcagtgaggggccccactccagggccccccctgattcctgttcccgtgggggcagcagcctccttctcggcgcccccaatcccatcccggcctggaccccagagcgtgtttgccaacagtgacctcttcccagccccgcctcagatcccatctcggccagttcggatccccccagggattcccccaggagtgcccagcagaagaccccctgctgcgcccagccggcccaccattatccgcccagccgagccatccctgctcgactaggcctcgaggggggcgtgctctcgggggggcctcacgcacccgcggcgcaggagcttcagtggtctggggccctccgccgcccctatgctgggaccaggctcccagtgggcagccctggcctcttccttaacgctggccccggtccagggccggcccctgtgcctggctggacaccgcactgcgcaaaggggccctggagctccaggcagggggcgctggggtgttgcactttgggggatggagtctcagggtggcagaggggggaccagaacccttgacaccatcctgaatgaggggtccagcctgggggggactctaccaaggtcttcttgggctgggaaagcccatgtagggcaggccttctataagtgcgggcaccaagggcgcctacatccccaggccttgctggggtgcaggggtatatcaacttcccattagcaggagctccccagcggcaagcctggcccagtgggctcggtagtgcccagctggcaggcctgaggtgtacatagtccttcccggccatattaaccacacagcctgagcctggcccagcctcggctgccagaggtgcctttgctaggcccggagccgttggcccgggccggccttgccctattcctctcctcctcctcctcctgggtcccccagggtggctgggcttgggctatgtgggtggtggtggcggggggtcttgggggcctctcagctcccgcccatgcctccctgatgggtgggcccagggcggcctctctctgaggagacctcacccactcctcgctcagtttgaccactgtaagtgcctgcactctgtattctattaataaactaaaataaagggaagacgcaaaaaaaaaaaaaaaaaaaaaaaaaaaaaaaaaaaaaaaaaaaaaaaaaaaaaaaaaaaaaaaaaaaaaaaaaaaaaaaaaa

SEQ ID NO: 553 - DNA, 1765 bp, Homo sapiens
tgtggtggttgtttttaagtgtggagggcaaaaggagataccatcccaggctcagtccaacccctctccaaaacggcttttctgacactccaggtagcgagggagttgggtctccaggttgtgcgaggagcaaatgatgaccgccaaggccgtagacaaaatcccagtaactctcagtggttttgtgcaccagctgtctgacaacatctacccggtggaggacctcgccgccacgtcggtgaccatctttcccaatgccgaactgggaggcccctttgaccagatgaacggagtggccggagatggcatgatcaacattgacatgactggagagaagaggtcgttggatctcccatatcccagcagctttgctcccgtctctgcacctagaaaccagaccttcacttacatgggcaagttctccattgaccctcagtaccctggtgccagctgctacccagaaggcataatcaatattgtgagtgcaggcatcttgcaaggggtcacttccccagcttcaaccacagcctcatccagcgtcacctctgcctcccccaacccactggccacaggacccctgggtgtgtgcaccatgtcccagacccagcctgacctggaccacctgtactctccgccaccgcctcctcctccttattctggctgtgcaggagacctctaccaggacccttctgcgttcctgtcagcagccaccacctccacctcttcctctctggcctacccaccacctccttcctatccatcccccaagccagccacggacccaggtctcttcccaatgatcccagactatcctggattctttccatctcagtgccagagagacctacatggtacagctggcccagaccgtaagccctttccctgcccactggacaccctgcgggtgccccctccactcactccactctctacaatccgtaactttaccctggggggccccagtgctggggtgaccggaccaggggccagtggaggcagcgagggaccccggctgcctggtagcagctcagcagcagcagcagccgccgccgccgccgcctataacccacaccacctgccactgcggcccattctgaggcctcgcaagtaccccaacagacccagcaagacgccggtgcacgagaggccctacccgtgcccagcagaaggctgcgaccggcggttctcccgctctgacgagctgacacggcacatccgaatccacactgggcataagcccttccagtgtcggatctgcatgcgcaacttcagccgcagtgaccacctcaccacccatatccgcacccacaccggtgagaagcccttcgcctgtgactactgtggccgaaagtttgcccggagtgatgagaggaagcgccacaccaagatccacctgagacagaaagagcggaaaagcagtgccccctctgcatcggtgccagccccctctacagcctcctgctctgggggcgtgcagcctgggggtaccctgtgcagcagtaacagcagcagtcttggcggagggccgctcgccccttgctcctctcggacccggacaccttgagatgagactcaggctgatacaccagctcccaaaggtcccggaggccctttgtccactggagctgcacaacaaacactaccaccctttcctgtccctctctccctttgttgggcaaagggctttggtggagctagcactgccccctttccacctagaagcaggttcttcctaaaacttagcccattctagtctctcttaggt

SEQ ID NO: 554 - DNA, 401 bp, Homo sapiens
  misc_feature (338)..(338): n is a, c, g, or t
ttttttttcaggccaaactaaagctttatgctataaaaacaagaaataaaataaggagatttataggccggctgattgtcagcaaacacaatatatttactgtattagcatttgctcacagtgcaaatggtacaacattacaccatttcaatatttcggtttttaaaaatgctgttttcattaactatattatattggcattacaatatgacaaaggagcaaatgaaatgttggtgaagaatttcaccttttcacaatatcaagcatatttttttaaccttagtataaggtactataaatccaagaaataaaaacatccacaaaatatattacatctnggtttgtcttttttctaagtactcaactttatacaaaagtctttcaaaaaatatcatttcccc

SEQ ID NO: 555 - DNA, 3485 bp, Homo sapiens
ccctaccgcccccaattccgccctgcccccgccgcggcggcgctagccgccactgagggaccgaccctataaaggccgctccgcgaggggtgcgcagcattcggcagagggcgcttcgacgggctgggctgtgcgcctgcgcagtgtgggtcgctcccgattccctgccccggccggccccgcctcggctccgcaccctcgccccgctctcagccgccgctctgccccgcagcagccagccccgtgtccggcagtatgttcagctgggtcagcaaggatgcccgccgcaagaaggagccggagctcttccagacggtggccgaggggctgcggcagctgtacgcgcagaagctgctacccctggaggagcactaccgcttccacgagttccactcgcccgcrctggaggacgctgacttcgacaacaagcctatggtgctcctcgtgrggcagtacagcacgggcaagaccaccttcatccgacacctgatcgagcaggacttcccggggatgcgcatcgggcccgagcccaccaccgactccttcatcgccgtcatgcacggccccactgagggcgtggtgccgggcaacgcgctcgtggtggacccgcggcgccccttccgcaagctcaacgcgtttggcaacgctttcctcaacaggttcatgtgtgcccagctgcccaaccccgtcctggacagcatcagcatcatcgacacccccgggatcctgtctggagagaagcagcggatcagcagaggctatgactttgcagccgtcctggagtggttcgcggagcgtgtggaccgcatcatcctgctcttcgacgcccacaagctggacatctccgatgagttctcggaagtgatcaaggctctgaagaaccatgaggacaagatccgcgtggtgctgaacaaggcagaccagatcgagacgcagcagctgatgcgggtgtacggggccctcatgtggtccctgggcaagatcatcaacacccccgaggtggtcagggtctacatcggctccttctggtcccacccgctcctcatccccgacaaccgcaagctctttgaggccgaggagcaggacctcttcaaggacatccagtcactgccccgaaacgccgccctcaggaagctcaatgacctgatcaagcgggcacggctggccaaggttcacgcctacatcatcagctccctcaagaaagagatgcccaatgtctttggtaaagagagcaaaaagaaagagctggtgaacaacctgggagagatctaccagaagattgagcgcgagcaccagatctcccctggggacttcccgagcctccgcaagatgcaggaactcctgcagacccaggacttcagcaagttccaggcgctgaagcccaagctgctggacacggtggatgacatgctggccaacgacatcgcgcggctgatggtgatggtgcggcaggaggagtccctgatgccttcccaggtggtcaagggcggcgcctttgacggcaccatgaacgggccgttcgggcacggctacggcgagggggccggcgagggcatccacgacgtggagtgggtggtgggcaaggacaagcccacctacgacgagatcttctacacgctgtcccctgtcaacggcaagatcacgggcgccaacgccaagaaggagatggtgaagtccaagctccccaacaccgtgctagggaagatctggaagctggccgacgtggacaaggacgggctgctggacgacgaggagttcgcgctggccaaccacctcatcaaggtcaagctggagggccacgagctgcccgccgacctgcccccgcacctggtgccgccctccaagcgcagacatgagtgatggcgcccggccccgcacctgccatttgcacgcccggccgggaggcagagacggggggaggggaagcctcaccatttctcaaggtccataaagactgagcggatgtttcctcgcctctcgaaaaggaaaaccaccatctttcttttaaggctgttcctgggcctggcgggggaggcaggggtgagaggatggaattgtgtgcacaagaactgtggctattttaatatataacgttagaggctgcgttctttgtcgccgcctcccctgtgtgccagccctgtgtgcacggcctctgccccccggccttgtgctgtggctggagctggacagtgcagtgactgcgaccgtgggggagccaggtcgcccttttggcagctgctaggctgaggctgcatggacaggaacaccaggcaccctccgtgtgcttctgagctgaggttgcttcacgggaccgtggcttccttcctcacctggctctgcctcccccgtgctctcgggcgaagtgggttcttgtgccttcccctcccgggcccaggctccccgtgcgcgggccctgccctttcctcccgcgccccaccggctccgacgcgcaaccccgctcagcagtcacagaagcagggcccagccaccttggtctttttttgggagttcaggggagtaggagaatgtcttccagaaaaatacataagctagtttctgttctgtaaagtgatatctttcatacttgaccaaagttcccaataacttcccaaccactgttcaaaagctgtgatttttgtctccccttcccaccctccagccaaggagcagccctgcccaggggaatttaggtgtgggtacccggggagcaccccgttcctggaccccagtgttgcatttcctggctgaggaagggtggtcatcccagctcctgccctaccctctcacttaactggagctttgggacgcaccctccacagtgggaggtggtggtggggtggcggtggcggggcctcacgacagcttggtgctggtaagaggaagcccgtggttctggctaggctctcatgtccagacagcggggaccaggggaaaacccagccccttctgtaatcccccttcatttcctaccttccttcctcctctgtttagcaaaggagggcagctcacttggatgtccttacaacgcccctggccccaggttgagcaataagaaaccagaaccttgcggcccagtggcccgggccagttcaggccgcctccccctcctctgcctggggccattgagccccagcctccaggggcccgggtgcgtttgcaagccagtggccactgtccgggctgtgatggcaccaaggcaggtggagcaccaggtaccacacagctgggcttcccaccaggctttcccgcgggggtctcagggagcttctccccagcgctgctcggagtctgcaggaactggccttgttctccttagcccgtcactccatacagtattaggtgaggatggatgcgggcgctgtccttgccgggaagtcactgttgaagttgcagtggcttgttcacacctgtgggaagagaagtgaagactttctccttgcattaaaaagtctgaactgtgaaaaaaaaaaaaaaaaaaaaaaaaa

SEQ ID NO: 556 - DNA, 1736 bp, Homo sapiens
tggtttttcggatcatgtctggtggctccgcggattataacagcagagaacatggcggcccagagggaatggaccccgatggtgtcatcgagagcaactggaatgagattgttgataactttgatgatatgaatttaaaggagtctctccttcgtggcatctatgcttacggttttgagaagccttccgctattcagcagagagctattattccctgtattaaagatccaaaaggtaattctggcacttggagactatatgggagccacttgtcatgcctgcattggtggaacaaatgttcgaaatgaaatgcaaaaactgcaggctgaagcaccacatattgttgttggtacacccgggagagtgtttgatatgttaaacagaagatacctttctccaaaatggatcaaaatgtttgttttggatgaagcagatgaaatgttgagccgtggttttaaggatcaaatctatgagattttccaaaaactaaacacaagtattcaggttgtgttgctttctgccacaatgccaactgatgtgttggaagtgaccaaaaaattcatgagagatccaattcgaattctggtgaaaaaggaagaattgacccttgaaggaatcaaacagttttatattaatgttgagagagaggaatggaagttggatacactttgtgacttgtacgagacactgaccattacacaggctgttatttttctcaatacgaggcgcaaggtggactggctgactgagaagatgcatgccagagacttcacagtttctgctctgcatggtgacatggaccagaaggagagagatgttatcatgagggaattccggtcagggtcaagtcgtgttctgatcactactgacttgttggctcgcgggattgatgtgcaacaagtgtctttggttataaattatgatctacctaccaatcgtgaaaactatattcacagaattggcagagggggtcgatttgggaggaaaggtgtggctataaactttgttactgaagaagacaagaggattcttcgtgacattgagactttctacaatactacagtggaggagatgcccatgaatgtggctgaccttatttaattcctgggatgagagttttggatgcagtgctcgctgttgctgaataggcgatcacaacgtgcattgtgcttctttctttgggaatatttgaatcttgtctcaatgctcataacggatcagaaatacagattttgatagcaaagcgacgttagtcgtgagctcttgtgaggaaagtcattggctttatcctctttagagttagactgttggggtgggtataaaagatggggtctgtaaaatctttcctttcttaaaattaatttcctagttctgtagaaatggttgtattagatgttctctatcatttaataatatacttgtggactaaaagatataagtgctgtataaaatcagccaattatgttaaactagcatatctgcctttattgtgtttgtcattagcctgagtagaaaggcctttaaaatttttttagaaagcatttgaatgcattttgtttggtattgtatttattcaataaagtatttaattagtgctaaaaaaaaaaaaaccctgttgctaagccccagcaagcaatcctaggtagggtttaatccccagtaaaattgccatattgcacatgtcttaatgaagtttgaatgttaaataaatcgtatattcactttaaaaaaaaaaa

SEQ ID NO: 557 - DNA, 1244 bp, Homo sapiens
cgcgagcgcggccgctcccgatgcgctcgtgccgcccccgccgtgctcctcggcagccgttgctcggccggttttggtaggcccgggccgccgccaggcctccgcctgagcccgcacccgccatggacaactacgcagatctttcggataccgagctgaccaccttgctgcgccggtacaacatcccgcacgggcctgtagtaggatcaactcgtaggctttacgagaagaagatcttcgagtacgagacccagaggcggcggctctcgccccccagctcgtccgccgcctcctcttatagcttctctgacttgaattcgactagaggggatgcagatatgtatgatcttcccaagaaagaggacgctttactctaccagagcaagggctacaatgacgactactatgaagagagctacttcaccaccaggacttatggggagcccgagtctgccggcccgtccagggctgtccgccagtcagtgacttcattcccagatgctgacgctttccatcaccaggtgcatgatgacgatcttttgtcttcttctgaagaggagtgcaaggatagggaacgccccatgtacggccgggacagtgcctaccagagcatcacgcactaccgccctgtttcagcctccaggagctccctggacctgtcctattatcctacttcctcctccacctcttttatgtcctcctcatcatcttcctcttcatggctcacccgccgtgccatccggcctgaaaaccgtgctcctggggctgggctgggccaggatcgccaggtcccgctctggggccagctgctgcttttcctggtctttgtgatcgtcctcttcttcatttaccacttcatgcaggctgaagaaggcaaccccttctagagggagccatgagggtctgggcttcagagctaggtctttggggaagtcctggctgactgccttagcagtgggggtgggggtgggggcaggggcaggggctttatgtgtttttgcttggggggcgctgggcctagcccagagtagtgcttgctccccctgccttgtcccaccagggaggcagcagactcaggccctccatggtcctctttgtcattttgttgacatgcattcctccttttgtcatcttgttggggggaggggattaaccaaaggccaccctgactttgtttttgtggacacacaataaaagccccgtttatttgtaaaaaaaaaaaaaaaaaaaaaaaaaaaaaaaaa

SEQ ID NO: 558 - DNA, 1403 bp, Homo sapiens
gtttaatttattagcatcttaatgtaccccatttttatatactgaatgtggccttttgagtgaaataggaagcttcatggtgttggagccacctttgtacagttgtttaaagtttcccattgtcacggaaaacattggttgcaaagcccctcaaagccctcaagtgccttctgtgagtttaaatgtgctggtgccctccagaaaagcctcggcctcagctccgtttccgcctgttccctcccccaggataatgaatggttactgcactgtaaagaccgtggtctcttttcactaaataggagattcgagtttcccagtttacatgaatgaagtctgaatttaagacggtgatgaaactgaggttcagtactctcgggactcgaggaaattattcctgagacatggagtaattcttacaaatttaaactattgtacagatccacatacatgttgttaagtacctaatgttttgctgaacttttaaaagttaatttccaaaatgtatagggattcatgataattaaacctttttattgctcatttttttagtagaagaatatcacttatttttagacttgtaaaatgtatgaactggtgagcggacatctgttaagagagtcactagtcagaatgttaaaggagtgcatgcaggatgccccaaatgtcgtgaactcttgttactcctgtatgtagtagtgtaagcatgtgacttttaacaccatttggtttgaaactaatgtagagatgcctgattccaaacaggtgtggagaatattgaacggctcagaagccgcgtcccttacttaacacaattccgaatctccctcatccatgatgcgtccattggatcactcgctggtggtcactgtgtggcagttactaggggaattctgcctctgactgttctttttcttttggtctttaaacaccctgtcgtgggatgtgctcactgatttgtggctatgttgaaggtatcacttgtcttgagggttttcaatatttcaggatcatgctggtggcaaaaggactccatgcctctgtggaatcatgtccacagggggacctgcctcccgtgatgtcccacctttccttcaaggtctgtcatatgagtcctccccttttacaacacttattatggtatttttcaagttattcttcttagatttgcagtacctactgaaatttgtgtttttatagttgaagttaggaaaatgctatttgatttgtaattagatatttaagtcacttgtccaatgatgtgtatgtctaagcctcatgtaccgatttgaagtcagacttaaaaatgtatttacagattcacttgagactttttaatcggttcttcaaatatttcatgtttacattaaaaatttccagagaagcaaaaaaaaaaaaaaaaaaaa

SEQ ID NO: 559 - DNA, 646 bp, Homo sapiens
gggtgagcaaaggggcgggtccctggctgctgtggcctcccctgaccccctccccccgctgctggggtcctcggccaagcccccttctcactggactgagacatgaggctgagctggttccgggtcctgacagtactgtccatctgcctgagcgccgtggccacggccacgggggccgagggcaaaaggaagctgcagatcggggtcaagaagcgggtggaccactgtcccatcaaatcgcgcaaaggggatgtcctgcacatgcactacacggggaagctggaagatgggacagagtttgacagcagcctgccccagaaccagccctttgtcttctcccttggcacaggccaggtcatcaagggctgggaccaggggctgctggggatgtgtgagggggaaaagcgcaagctggtgatcccatccgagctagggtatggagagcggggagctcccccaaagattccaggcggtgcaaccctggtgttcgaggtggagctgctcaaaatagagcgacgaactgagctgtaaccagactggggaggggcagggggagaggcccccatcagggaccagactgttccaaaaaaaaaacaaaaaacaaaaacaaacaaaaaaacacttaaaagccaaaaaaaaaaaaaaa

SEQ ID NO: 560 - DNA, 1729 bp, Homo sapiens
ggggccagctcccaggaaagctggtctgcgagcggcccctgcccggctcccaggtccctgcgcgaccccgcccttcccgagaccccagccgggctgccgcccgcgtcccggaagctccagcctgaaccatgtttttcacttgtggcccaaatgaggccatggtggtctccgggttctgccgaagccccccagtcatggtggctggagggcgtgtctttgtcctgccctgcatccaacagatccagaggatctctctcaacacactgaccctcaatgtcaagagtgaaaaggtttacactcgccatggggtccccatctcagtcactggcattgcccaggtaaaaatccaggggcagaacaaggagatgttggcggccgcctgtcagatgttcctggggaagacggaggctgagattgcccacattgccctggagacgttagagggccaccagagggccatcatggccaacatgactgtggaggagatctataaggacaggcagaaattctcagaacaggttttcaaagtggcctcctcagacctggtcaacatgggcatcagtgtggttagctacactctgaaggacattcacgatgaccaggactatttgcactctttggggaaggctcgaacagctcaagtccaaaaagatgcacggattggagaagcagaggccaagagagatgctgggatccgggaagctaaagccaagcaggaaaaggtgtctgctcagtacctgagtgagatcgagatggccaaggcacagagagattacgaactgaagaaggccgcctatgacatcgaggtcaacacccgccgagcacaggctgacctggcctatcagcttcaggtggccaagactaagcagcagattgaggagcagcgggtgcaggtgcaggtggtggagcgggcccagcaggtggcagtgcaggagcaggagatcgcccggcgggagaaggagctggaggcccgggtgcggaagccagcggaagcggagcgctacaagctggagcgcctagccgaggcagagaagtcccaactaattatgcaggcggaggcagaagccgcgtctgtgcggatgcgtggggaagctgaggcctttgccataggggcccgagcccgagccgaggctgagcagatggccaagaaggcagaagccttccagctgtaccaagaggctgctcagctggacatgctgctagagaagctgccccaggtggcagaggagatcagtggtcccttgacttcagccaataagatcacactggtgtccagcggcagtgggaccatgggggcagccaaagtgactggggaagtactggacattctaactcgcctgccagagagtgtggaaagactcacaggcgtgagcatctcccaggtgaatcacaagcctttgagaacagcctgagccttcagccctcacagatgcccagcctcatagctgaagttgcctgaatgatcctcctgttgcatgtaacccactggcctccctgagcatgtccattgacagtgaggtcccacccctcatctctccttgccaaatagtttgtgccttgtcttgaagggggttgctccccttgccaacctcacactgctatgattgccaactccagcggtcccatgtcagccttctgatgatcccactccaccccaccctcaacttatttaacttcctaattaaatcagactgtttgaaaaaaaaaaaaaaaaaaaaaaaaaaaaaaa

SEQ ID NO: 561 - DNA, 2498 bp, Homo sapiens
cgtctctgcgttcgccatgcgtcccggggcgccagggccactctggcctctgccctggggggccctggcttgggccgtgggcttcgtgagctccatgggctcggggaaccccgcgcccggtggtgtttgctggctccagcagggccaggaggccacctgcagcctggtgctccagactgatgtcacccgggccgagtgctgtgcctccggcaacattgacaccgcctggtccaacctcacccacccggggaacaagatcaacctcctcggcttcttgggccttgtccactgccttccctgcaaagattcgtgcgacggcgtggagtgcggcccgggcaaggcgtgccgcatgctggggggccgcccgcgctgcgagtgcgcgcccgactgctcggggctcccggcgcggctgcaggtctgcggctcagacggcgccacctaccgcgacgagtgcgagctgcgcgccgcgcgctgccgcggccacccggacctgagcgtcatgtaccggggccgctgccgcaagtcctgtgagcacgtggtgtgcccgcggccacagtcgtgcgtcgtggaccagacgggcagcgcccactgcgtggtgtgtcgagcggcgccctgccctgtgccctccagccccggccaggagctttgcggcaacaacaacgtcacctacatctcctcgtgccacatgcgccaggccacctgcttcctgggccgctccatcggcgtgcgccacgcgggcagctgcgcaggcacccctgaggagccgccaggtggtgagtctgcagaagaggaagagaacttcgtgtgagcctgcaggacaggcctgggcctggtgcccgaggccccccatcatcccctgttatttattgccacagcagagtctaatttatatgccacggacactccttagagcccggattcggaccacttggggatcccagaacctccctgacgatatcctggaaggactgaggaagggaggcctgggggccggctggtgggtgggatagacctgcgttccggacactgagcgcctgatttagggcccttctctaggatgccccagcccctaccctaagacctattgccggggaggattccacacttccgctcctttggggataaacctattaattattgctactatcaagagggctgggcattctctgctggtaattcctgaagaggcatgactgcttttctcagccccaagcctctagtctgggtgtgtacggagggtctagcctgggtgtgtacggagggtctagcctgggtgagtacggagggtctagcctgggtgagtacggagggtctagcctgggtgagtacggagggtctagcctgggtgtgtatggaggatctagcctgggtgagtatggagggtctagcctgggtgagtatggagggtctagcctgggtgtgtatggagggtctagcctgggtgagtatggagggtctagcctgggtgtgtatggagggtctagcctgggtgagtatggagggtctagcctgggtgtgtacggagggtctagtctgagtgcgtgtggggacctcagaacactgtgaccttagcccagcaagccaggcccttcatgaaggccaagaaggctgccaccattccctgccagcccaagaactccagcttccccactgcctctgtgtgcccctttgcgtcctgtgaaggccattgagaaatgcccagtgtgccccctgggaaagggcacggcctgtgctcctgacacgggctgtgcttggccacagaaccacccagcgtctcccctgctgctgtccacgtcagttcatgaggcaacgtcgcgtggtctcagacgtggagcagccagcggcagctcagagcagggcactgtgtccggcggagccaagtccactctgggggagctctggcggggaccacgggccactgctcacccactggccccgaggggggtgtagacgccaagactcacgcatgtgtgacatccggagtcctggagccgggtgtcccagtggcaccactaggtgcctgctgcctccacagtggggttcacacccagggctccttggtcccccacaacctgccccggccaggcctgcagacccagactccagccagacctgcctcacccaccaatgcagccggggctggcgacaccagccaggtgctggtcttgggccagttctcccacgacggctcaccctcccctccatctgcgttgatgctcagaatcgcctacctgtgcctgcgtgtaaaccacagcctcagaccagctatggggagaggacaacacggaggatatccagcttccccggtctggggtgaggaatgtggggagcttgggcatcctcctccagcctcctccagcccccaggcagtgccttacctgtggtgcccagaaaagtgcccctaggttggtgggtctacaggagcctcagccaggcagcccaccccaccctggggccctgcctcaccaaggaaataaagactcaagccataaaaaaaa

SEQ ID NO: 562 - DNA, 2828 bp, Homo sapiens
agcagccggcacggggacagccggccgcacaacggatctgcaggcgcggagcaaaatgcacccgccgcgccgcgcggtcctgcagccccgccacggccccgcggcccgcacccccccggggcgacagtgagcctctcccgccaccaccgggggccgagcggagggctctcgggtgggagagcgggaccagatctcgacagctgttcatttccaggaagccaccgcagccagagcgaaaggggaccttctgccaccagcggggcatcagccagcggcgcgcatggatttatgaagacactcatgcaagaagtgggcaggacttggacaaacttttccaccggctccgcgtccgccgctccccgcgcctcgtctcctttcccctcctctcccggcggccgccgctgcccgcgatggtggccgcgctgctgggcggcggcggcgaggcccgcggggggacagtgccgggcgcctggctgtgcctgatggcgctgctgcagctgctgggctcggcgccgcggggatcggggctggcgcacggccgccgcctcatctgctggcaggcgctgctgcagtgccagggggagccggagtgcagctacgcctacaaccagtacgccgaggcgtgcgcgccggtgctggcgcagcacggcgggggcgacgcgcccggggccgccgccgccgctttcccggcctcggccgcctctttctcgtcgcgctggcgctgcccgagtcactgcatctcggccctcattcagctcaaccacacgcgccgcgggcccgccctggaggactgtgactgcgcgcaggacgagaactgcaagtccaccaagcgcgccattgagccgtgcctgccccggacgagcggcggcggcgcgggcggccccggcgcgggcggggtcatgggctgcaccgaggcccggcggcgctgcgaccgcgacagccgctgcaacctggcgctgagccgctacctgacctactgcggcaaagtcttcaacgggctgcgctgcacggacgaatgccgcaccgtcattgaggacatgctggctatgcccaaggtggcgctgctcaacgactgcgtgtgcgacggcctcgagcggcccatctgcgagtcggtcaaggagaacatggcccgcctgtgcttcggcgccgagctgggcaacggccccggcagcagcggctcggacgggggcctggacgactactacgatgaggactacgatgacgagcagcgcaccgggggcgcgggtggtgagcagccgctggacgacgacgacggcgtcccgcacccaccgcgcccgggcagcggcgctgctgcatcgggcggccgcggggacctgccctatgggcctgggcgcaggagcagcggcggcggcggccgcttggcgccccggggcgcctggaccccactcgcctccatcttgctgctgctgcttgggccgctcttttagccctcgcgccccccgccgttggctgcgggagagcccgcgtcccactcccgtgctcgcctcgaccccgcgccgggcacctgtggcttgggacagatagaagggatggttggggatacttcccaaaactttttccaagtcaacttggtgtagccggttccccggccacgactctgggcacttcccctgaagctcctctccggagcttgacttcttggacctcctcccccgccccaattccaagctccagaaactcccaactcgtctgccgtccagaaagctagctgcagtgttcaggacgtccgggaggaagcaagcatgtgggggacagaacagtagtcctggactcgaaagggaaggtgctgaccagtggggccttagcaatttgaagggttgggaaggaggaattatatttgcaaaggggctgtctattagcatatttcctttgagggggcaaaaaaaagtgccagtatcgacttttacagattgtggccagtgaggatattataatcctatgtaaacagaaaagtcccacttaccgattcattctttcactgtttgtatctgcgcccagaattctcagtgacgtgggggtgagggtgggtggcgattgccttagagggaacccctaaattggttttggataagtttgagcccttgaccttaatttcattgctaccactctgatctcttagcacatttcttaggattaagggtccaaaaatgctgatctaaggggttgccatggtgttgaacaatgcaactttttatttaaaaaagctctgcactgccatgtatgaaagtctctttatgatgtttgtttttttgtcatttttgttctttacatcaagaaattttatgtttaaatatgcggagaatgtatattgcctctgctcctatcagggttgctaaaccctggtacatcgtatataaaatgtattaaaactggggtttgttaccagttgctgtactttgtatatagaatttttataaattgtatgcttcagaaataatttatttttaaaaagaaattaaaagttttaaactcacatccatattacacctttcccccctgaaatgtatagaatccatttgtcatcaggaatcaaaacccacagtccattgtgaagtgtgctatatttagaacagtcttaaaatgtacagtgtattttatagaattgaagttaacattcttattttcaagagaatttatggacgttgtagaaatgtacaaatgcatttccaaactgccttaaacgttgtatttttatagacatgtttttttaaaaatcctaagtttttaaataactatggatttgtgtattttttttggttatttgttttattaaaacatgtacatcagtaaagagttttaaacaatga

SEQ ID NO: 563 - DNA, 933 bp, Homo sapiens
tctgagcaagcatccctgaggtcaggggcgcgcgtgtgcgctccggagagggtgggagcggcctggagtgtggatgcacagggtgtgcgcgccctgagtgcctagcggcccttggccggccaggcggctggacctggtaggccgggtgcagagccccgggtaccctcctgccccctgcggcgctcccgcccccgtcgccaccccctgcccccccgcaaagtgatgtcgaaataaaaagccgcgttgcggccggtgggggagagagaggcagcgtgagcgccaggaaggtagcgaggccagcgtcgccccgggactcgctgctcaagtctgtctattgcctgccgccacatccatcctagcagggccccgtcgcccaccaggcggacaaaagcggtccgctgaacaccatgcggccgctcggcgtgccgcccaggctctgctggtgagcgccgccaccccgcgcccaggtcccgcgagcccgcctgccgcgcacctcgccctgctcccagctctactccaggccccgtccgcccgggggcgccgcccaccgcgcctcgctcggtgagtttcttccacttccaccttccctgggcccggcccttcccgcccccggcccggcccgcctggcacccgaatcgcttggtccgtttgccctgtggcccctacctttggggctcgccttggccctgccagagaccggaaaccctggttatagggactttaaccagagggagtatttggttacctgggcacagcaggcccgcctcgggcctcttgtcttcccatttctcggagccacaggccacgagaccctggcattcccagagcctcgcaaagcacccccgcctcccggcccccgaactggggcctttgtctcggccgcccccaatccccaggccaccgcggcggatgcgtccgagccgggccgccgag

SEQ ID NO: 564 - DNA, 1079 bp, Homo sapiens
cttatggctaatggtcagctggttaagatgctgctttatacagaggtaactcgctatctggattttaaagtgactgaagggagctttgtctataagggtggaaaaatctacaaggttccttccactgaagcagaagccctggcatctagcctaatgggattgtttgaaaaacgtcgcttcaggaaattcctagtgtatgttgccaacttcgatgaaaaagatccaagaacttttgaaggcattgatcctaagaagaccacaatgcgagatgtgtataagaaatttgatttgggtcaagacgttatagattttactggtcatgctcttgcactttacagaactgatgattacttagatcaaccgtgttatgaaaccattaatagaattaaactttacagtgaatctttggcaagatatggcaaaagcccatacctttatccactctatggccttggagaactgccccaaggatttgcaaggctaagtgctatttatggaggtacctatatgctgaataaacccattgaagaaatcattgtacagaatggaaaagtaattggtgtaaaatctgaaggagaaattgctcgctgtaagcagctcatctgtgaccccagctacgtaaaagatcgggtagaaaaagtgggccaggtgatcagagttatttgcatcctcagccaccccatcaagaacaccaatgatgccaactcctgccagatcattattccacagaaccaagtcaatcgaaagtcagatatctacgtctgcatgatctcctttgcgcacaatgtagcagcacaagggaagtacattgctatagttagtacaactgtggaaaccaaggagcctgagaaggaaatcagaccagctttggagctcttggaaccaattgaacagaaatttgttagcatcagtgacctcctggtaccaaaagacttgggaacagaaagccagatctttatttcccgcacatatgatgccactactcattttgagacaacgtgtgatgacattaaaaacatctataagaggatgacaggatcagagtttgactttgaggaaatgaagcgcaagaagaatga

SEQ ID NO: 565 - DNA, 35687 bp, Homo sapiens
aagctggagtgcaatgatgtgatctcggctcactgcaacctctgcatcccagggttcaattctcctacctcagcctcccaagtagctgggattgcaggcaggtgccagcacgcctggctaatttttgtatttttagtagagatgggttttcaccatgttggtcaggctggtctcagactcctgacctcgtgatctgcccacctcagcctcccaaagtgctgggattacaggcgtgagccactgcgcccagccagaaataatttttaaaaataatttcgagcccaagcatgatggctcatgcttgtaatcccatcactttgggaggctgaggcaggcagattgcttgagcctaggagttcaagatcagcctgcgcaacatggtgaaaccccatctctacaaaaaataaaaaattagctgtgtgtggtggtggtgtgtgcctgtagtcccagctgtttgggacgctgaggtgggaggctcacttgagcctgggtgatcgaggctgcagtgagccatgatcctgagactgtactccagcctgggcaacagagtgagatgctgtctcaaataaataaataaataaaaataaaataatttgaggcctagggctctgaaattctgagatctcctttatgcatttgagtgactgagatgatctgaagctggatccagtgctcctgagggctgctttatttctggttgactgtgactcctagagtaagaaacctgcaccccatgtgtggggtattatggcatcccctccctcagccacatgagtaagtcaacagcactgctctagaccaggtgtggtggctcacgcctatagtcccagctactcgggagactgaggcaggaggattgcttcaggccaggaatttgaaaccagccagagcaatatattattaggttggtacaaaagtaattgcggtttttgcctttaaaagtaatggcaaccctgtttcagcaaagtaaaaagcaaaaaaaaaaaaaaaaaaaggaaggaagaattaaaaaaagaatcagctgggcgtggtggctcacgcctctaatcccagcactttgggaggccaaggcgggcagatcatgagatcaggagatcgagaccatcctggctaacacggtgaaaccccatttctactaaaaatacaaaaaattagccgggcgtggtggcaggcgcctgtagtcccagctactcaggaggtggaggcaggagaatggcatgaacccaggaggtggaggttgcagtgagccgagatcatgccactgcactccagcctgggtgacagagtgagactccgtctcaaaaaaaaaaaaaagaatcactgctctgtctctcagcctcctcttccaggattggccgtcgccttgaggggaatgctggccttgcctgtctccagccctgtacctctctgcctcctatgcctttaagcacatgttttctatttgctgggctgtgaaatctgctcttcatctgatggggtttgctttataggtgactagattcttttctcttggtggttttagatttcgcattttcacattgaccttaaatagtctgattatagtttgccacggcaaagaccctttgcattgcattgtttggggatatttgagcctcctctatctggatgtctaatctcttgttagatgtgagtagttttcattattattttattaatgggctggcatgtgggccttggttccaggcgggctcagaggggcagctgcctgatgtctgggcagcttctctttctgtcttttcttacctggactctgggttgcttgttagctgcttctgccagttctgagttttcaaggggagaggggcccagtgatggctgttctttgaaggaaagggaagaatgtctcctgtttaacatgtttctatgtttccagttacttggttagttagttagagccagggtctctcgctctgttgcgcaggctggagtgcaatggcatgatcgtggctcacagcagcctccaccttccaggctcgagcaatgctcccacctcagcctctcaagcagctgggactgcaggtatgtgccaccatgcttggctgcctttttaaattttttttttttaatacagacaaggtctcactatattgcccaggctggtcttaaactcatgggctcaagtgatcctcctgcctcggcctttcaaagtgctgatatcacaggcagggtttccattttttaaagctcccagcagtggtataaactcctcctttccagagaaagcgcactctgtccgcatccctcatgttgtcctctcctgcctctgcttagggttcactccgggggaaagtgccacttgagagtttcctttttatgtgtggttctgactgaccgctccctgctcacagatgctgcttctcagggtggggtccctgaggcctggagtgtggcctctgacgaccttcagggccaggtgcggaatgagagcctgtggccacatggcccccggtgggagacgtcccgccgccctttgcttctctgtgccactctggctgcacagttcagagccttgggaaacgttaaccagtaggacctagaaggggaggtgagaaggggtcaccccccaggtgtgcctgtggtgagccttcgtgctgagcaggtgcagggagggaggcccaggtgcacacacctgtgaagtaggggcagctggctgggctccttgacctgctccagagcttcttattttctggccacttcacctgcagaaggcccaggtggctgtagccgctagggtcccttgcagtggaaatgatgcctgtcctcagcccctctctaggcctggcgctgtgctcagcaccgtcgtgtgtgtgtatgtatatgtgcacgcatgtgaatgtgtgcagacatcatgaggtgtggtccctgctgttaggcagcttgccttgtggctgaagtgaaccatcacctgaatcaagggatggaaacacaaggccagatgcagtggccttctatggagtcagacggtggctccgtgacctggcttcactccagaactacctggggtttctagctgtgcaaatcccaggtcccactcagattatgagtccagttctctgcaggtggaacccaggaaggtgtatttttaacaagatggtactgctcattcacccagcccagccagtggtcttggcatacccaggaaccgctgacatagagcttgtgctccccataaagtgggaaacagagcgttcctgggtgggggacatgtggcttggtcatgacagtcagggtgttacataccaggacagactgtgttcgggtgacattaaggacaagctcctgcaggctagctgcctggatagtgctggctgggggtagaagttagaggggtcacagaggggcttcctcccggccccctcatcagctgcttgatttagggcttggttctgggtccttctgggcctgattctgaaccatgggactggtgtggcctgcaggctcctcccgccacaagctgttcatggtgcagggggagaacagtgtccacaattccccagacagcagctgtggatgccaggcccccaggagttgttactgaagttgctgctggacagctcgcctttcactgagctccacatagcacccgtggtgatgggagccggatggagagagcctgccagcctgcacatcagctcccaactgggcggggcagagggaggagggggtggggaccccaggcagcagggctctgggagcagtggggccctgggttccaggggtgtctggcaggcccctccttactctacgtctctcagcctctggatggaggtgctggccgcagtcgggctctgcctctgactaagggttggggaagtggcgggtgtgggctgctgccccgtggggcctctgaacagaccccagggcctctgccaatcatgactccttcctttcagctggacccacaggccctgcaggacagagactggcagcgcgccgtcatcgccatgaatggggtacgtgtccgtgggactctcctggcgcccacttcccccagaaggatagggtggcctctgttcatttcaaatcagtcagaggtggctgagcctgaggcagcatctgagagggagcctggttggagaagggagggcccccaagagcagaatcaccatgcacgggaatcgtcattcattggctggaatgcagttgccagccaggccctgagcatccctcctcaaacaaaggtctcatggcaccaccaggacaggtggggcctccactcagggacctgggggctgcccatagaaatggagacccctgatttgtctttaggtaccccagaaaggtttaggccttaaaagcaatgacacacccaaaaaggcccgggtataaatggtaaaatgttaatatttgagattcttggctttttcttacattattctgtctttcctacttaatttttaattgttactaagagaaagctggtcacagtacactataatctcagctactctggaggctgaaccaggagaatcactggagcccaagagtttgattacagcctgggcaacattgcaagatcccatatcttaaaaaaaagtaagcaagcaagagaagcagcggggattttaggaggtgcttctgcagaaaccagtcgtttacatcatcttcaacaatcctggctcttgctgaagtagactaggggcttccccgaggggcggctccacctcatgctgagacctctgcatgccttgggggtggaaatatttgatgagactcccaggggtccttgggaccttgggctatgaggaccagaaggattagaggactgtgccccttctccccactgtagatcgaagtaaagctctcggtcaagttcaacagcaggaagttcagcttgaagaggatgccgtcccgaaaacagacaggggtcttcggagtcaagattgctgtggtcaccaagtgagtggggaggggcttgggctcacgcactgagggtgcctgtcccttcagctgtttctgcagaaaagagcatgtgtgggtctctcctctctgtgcgtggccactgcacggtgaggtcaggccccagggaacacggcgtcttcagctacctcctgtgtttcctgcaaaccagctcaggaatgtccttgccaccttgcttggaagcagtaggctggctccaggaactgcccaagtgcagggttttctgcccttgcttggaattagtcacggtcccagattcctgttgaatggttgtaacccctgcccctttgtcacgagtcagttgccaagagaagcctgtttgttggtttgagagcagttcatgcagacatagaccacttcctctgagaattcatttgcctccctaggatggaatctggctgggcctctgaccttgctggtcacgtgggccggggcctccatcagtcataccctggactcctatctgtgtctaaacaccacgccccacccccactcgcatagcactctgggagggctgtgggcatgagcagcgaggactccatcagcagctcccccagataagccctgctaatgagggggcttgcgaagcagctttgatgtgctggtaaatccaggtgcaaaacagaactcaagttaaggcctccgcacagcactgcgttctaactgtgaaggattcttactctagtgtcctgtgtggaggtattggaattgtccattgctaagactcagaggagaaaagcacttagcatcgcaggacttggagcaccggtgctgaggcaacccttcattcattcgtcggatgtgtgttaaggcccaggcccagggcaggggtcagggattctcctctcacacagcacgtgggtggcaggaccaacaccgggtctgacctcccagacgggggcacaggctgctaaccccaggcctggaatctgtcagatgcccttcccgtgctgacttgacttagacaggcctcctgaccttcccgcaaaggtcatgtgtgattcgcaggggttctggccgcttgaaaggttcctgagaaagtacatgccatgaggacagagcttgcagagggaggacaggcatgcagaaggctctgtgtgcagccccagacctgggtaccttcgtcaccgtcctcaccccacctccgggtgtgcacatagggagcaggtctcctgtgttatggcccaagcagggctgttaggacactgagaacattccctcctcccgcaggagagagaggtccaaggtgccctacatcgtgcgccagtgtgtggaggagatcgagcgccgaggcatggaggaggtgggcatctaccgcatgtctggggtggccacggacatccaggcactgaaggcaggcttcaacgtcagtgagtgtcggcctgcgcaggacgggatggaggtgtgggcagtggtgtccgcgatgagatctcagagtgctccatggcccaggcatgtcacatccttctctgtgtcttttcttcatttactgttttattattttaaaaaaagagaaaacaagagttgtacaaacagcttctatagaagccagtttttacaccatcgtacccactcatgccacttggtggagtggaccaggggcttctgtggggacttggccttcctgccttgggggtggacaggaggtggaagcccaggactcagtgcggtctgtccactgccctgtatgaggatgtggtgggcagagggcactgatgaaattcagcgcaggccggggctgcagcatctccgcctccatctcaccaaccctcacaggctttgaaggacccagactggcctcaaatgccaggggagggcactgagaccccagagggtccctcccagcatcttcaaagcaacaggattttgtgcctgcaggcccttctttgcagcacacaccacccaccctgaccaggacccctagaatgcccagcatccctgggagggccctgtggtagtttcagctccctctgggggcccagaatgaacctggcctgtggtgaggatgtaagcaccaatggccaattgggtccaaaggaagacaccggttcaaacactgaaaccaatcagattctcccacggccttcctgctatcagacgacactggtgcaggggtggttgctatgtacagggcagagccacccaatccccacgcaggcgctgtgtcctgccatgctggcctcctcctggccatcacatcaggccaagcaggggagaggaatgggaatgcccacgcacccctatcaactctgcagacacagaaccatgcacagctcttgggaggagtcagatgagctgctcaaagcccaggagggacccgcacagtggtcagtgtggcagggacggtgctttagccaaggcagggatggcgggtgactcactcaggatcttcaaggaggccgctgcatttccatgctctttccagataacaaggacgtgtcggtgatgatgagcgagatggacgtgaacgccatcgcaggcatgctgaagctgtacttccgtgagctgcccgagccccttttcactgacgagttctaccccaacttcacagagggcatcggtgagcactggaggccttggcctcgtgggagatgtctcccccatgtgcactgctgccctcggaggctgtgaaaagcgaggtgtgggaacctgagttgtaacccctctgccatggtcggcattttaacccaacctcaaaaagcaggggaccagaaccgagcctgtcctggaaggccttgcccatccccagagggctccccatccctattcctcaaggaggccaagtgggtgaaatggtcagcactgccgtgctgtggggtcctaaagtctgctgtcctccttcctgcagaccagggctaaacactggtgcccaggtgctcttgccatgggtcctggtccagccaagcatggtttcaaacatgacctgacccttagtcaacctggaggctgatgtctagagtgggcgctggagcgtgcagcacctgtggcctccgcatcacccttagggcaggtctgcctcccgggcccatgcacagaggacctggtctcccagcctgcaggtgcccctgtggtgtccaggacgacgagggggtctctgcgtacttggtggggctgggaccctcccacttcccacctccttgtgtccctcactcccctgtttcattccatgctgagcctcccctgccttgggctccctggggagggggtggtggcaggagttgcccgagggcagctctgcccatgagcagctgctctagcggctcctcctgctgctgttcgccgggtgctgctgagccctgcgaggcagagaaaaggcgttcaggtggttcacaccccacacaggtgcccctcacagggtcctcactggcggccagcgctgtgggtgtgacgatgatgacaagcctaaactgcgcaaggactcgtgtcccgggcgctccatgtgaccacctcgggagaggtctccggcttgtcgtaacccaggggagtgacccactgcctcctgcagctctttcagacccagttgcaaagaagagctgcatgctcaacctgctgtcgtccctgccggaggccaacctgctcaccttccttttccttctagaccacctggaaaggtagcccagctctcttgtggctgcccaggactccaggtctccaggccgttggggtgcccctctgctcccaccagacccccagcaccaaggaccttttcccccgacccctgtctgcagtaactcactgcttctaaggactagcaccactgccacccctgcccctgcctctcctctttgccacccgcctccctctgcactgtggccttaacaaagagctcagagctttggccgtggccagcagtgcatttggaccgcccccacttccctcccaagcacatcatgaagacctccccatcagcccagagctggccccttgtcccgggccactgagacccagaagtaccaaggctggagtcagcttgcagcacagccagggtcgaggtcactccctccctgaggactctagcatggcacagcccctctgcctctctcctggtggtggcgttgaaacagcaccctctgcttcggtcctctacagggtggcagagaaggaggcagtcaataagatgtccctgcacaaccttggcacggtgtttggccccacgctgctctggccctccgagaaggagagcaagctccctgccaaccccagccagcccatcaccatgactgacagcaggtccttggaggtcatgtcccaggtatgggaagacagcctccagcccatgcaaccccagcctgacagaggtggcctctgcctgccccacccccagtcctgcccatcttcccacttgcattgtatgtggtggtggctgagattcagagagagggacttgcctaggtttgcatggatgggagtgatagggggtgcccaggccacctcctggtcctgctggtgcatcttgctgggggcttaaaaccaccccaagtgttcgggtgtggtggctcatgcctgtaatcccagcactttgggaggccaaggcaggacaaccgaacccaggtgtttgagatcagtctgggcaatgcagcaaaccccatctccagaaaaaatagaaagaaaaattagtcaggcattgtggcacacatctgtaatcctaggtatctgggaggctgacacaggaggattgcttgagcccaggagttagaggctgcagtgatccatgatggagccactgtactccagcctgggggacagagcaaggccctgtgcatctctaaaataaataaccaccccccacccaacaagtcatgccttgtcaggaccccaccccacccccgtctcactgtaaggggttcatgacaccagcaggggtttctagcacctgaggtggacttgggggcttgggccccaaagacctccccaccagcagctgtgagcccccctctgagccactctcctcttccccactctgcgagggcaggtcgaggtgctgctgtacttcttgcggctggaggccatccctgccctggacagcaagagacagagcatcctgttctccaccgatgtctaaaggtcccagtccatctcctggaggcggacagatggcctggaaacctctggctaatcgggccatctgtagagtgggaatcaagattttctgaggcatccttgggccacccccaggtgtcaggccatctgccaagagacagtggcccaaagcagaaggacaggtggcctgggcagatcccgcccaggtctgaaagccccaggctggcctcagactgtgggttttttatgtggccacccgagggcgccccaagccagttcatcttggagtccaggcctggccctgggagacagggtgaaagcagtggtttttatgaacttaacttatagagtctaaaagatttctactgaatcacttgtcaagaagcgccctctctggggagaagggaacgtgaccggattccctcactgttgtatcttgaataaatgctgctgcttcatcctgtgggggccgtggccctgtccctgtgtgggtggggcctcttccatttccctgacttagaaaccacactccacttagaacagggtttgagaggcttagtcagcactgggtagcgttttgactccattcttggcttgcttctttttctttccagaaggatttttgtgcagaaatgggtcttttgttgccgtgttagtcctccttggaaagcagctcagaaggcccgtgaaatgtcgggggacaggacccccagggagggaatcccaggctacgcaccttagggttcgttctccagggagagcgacctcgtcccccgatcctgaccgcccttccggcccacgctctcctgtttggcttccacaggcctggacttctctggcttctctgcccacacactccctgcccccagtgtccctgcccctgccccagcacaggtgacttcatttctgtcctctcagctcagtggactcgctcaacttttgtataagtctccacttggtggtagcagcttgctgatgacttgttttaaaactttcatcctaaataaccttttgatgcttgaatatttttaagttttatacatagtttctaatttttttcccagcagatccagatacctaataagatgctggaatgtaatccctggacaatccgtgtcctggcagcatttggtcttcctctaagcgcctggctccgctgttctcaggagtgggttctgaagtctctggagaacaggatacgtggagggttaggaaggggccaggcctagagacgggagactccctcccggagcaggtggaggcacaggaccattcgctaccccatctgccgacagctgcgggggagcccaggcattctttgtaagccctcctgactacctgactcaaagaaaacagaagcatggaggccgccaagtattttcaagaaataaccccatgaatattccatcacttttttagaaagaggggcttggggcaggcagaggagagaagggagagcaaactgagagccaagtttccagacagtcctgcaggaggagaggatgcagctccccagagggaagcaggatcacatttaaggaagtgtgtggggtccctggatgacaccagcacccagtgcggctctgtctggcaaccgctcccaaggtggcaggagtgggtgtcccctgtgtgtcagtgggcagctcctgctgaacccgcagctcactggggagcctgacagtggggccatgcgcctgacactcctctctgcttgtggacctggcaaggcagggagcagaaaacagagccccttgaaggcttcctgtctgcgtctgtgtgcagtgtggatttagttgtgctttttacttgctgggagagcacagccaccatttacaagcagtgtcaccctcgtgggtggcgaggacagaacaggagcctctgctctctgtacctatctgggcccggtgggctcccttgtcctggcttccatctctgtctcagcgaccattcagccctgcgcaggaacacatgttgcttagaaaagccaaatccagccttgtctctgcctcctctggtctcatgatgtgcatctgttaccttgaaactggaaaccagtctatcaatgtctgtgccaattttttattccctccccaacctccttccccatacgactttttatttatgtaggatgtgtgctgtctaatgatgggatgaccacacttttccatgttctaaaagtgctcctctcccgcagggtcccagggctggtggttgctttgggtctacagctacgtcttacccgcctcctgcctcaacagcctgtgtggtggcaaagccggtgtggggctggggaacgcagcgttctccaggagggggacccggctctccttctgcagtgcaggcaaaggcctagatgccagtgtgacctcccacaaggcgtggcttccagactccccggccggaagtgatccttttttgccgcgggccctgagtttgaagcagcctggctttctcttggtaagtggctggtgtcttagcagctgcaatctgagctcagccacctacacaccaccgtggccgacactttcattaaaaagtttcctgagacgacttgcgtgcatgttgacttcatgatcagcgccgctgggaagaacccctgagccggtggggtggggctggaagcagcaggtgcagtgatggggctgggtgcccaggaggcctcagtgctcaatcaggccaaggtggccaagcccaggctgcagggaaggccggcctggggggtgtgggtgagcacaggcaggcaccagctgggcagtgttaggatgctggagcagcatccgtaaccccactgagtggggtagtctggttggggcagggaccgctgttgctttggcagagagagatgatccccactggggagaggctgttctgactctgcaggtgggacagggacagatggccaccagggtgacccggctggtcttcctttgctatgctaagccctgggacgtggaggattcctgccacacagcctgggcccggtttcttacctgtggccaccgctctggcacgagcccctcagtcttgggtggtttctgcctggtccgggatttggtgttcctgctgagtccagcctttctgccacctccgcatgggccgtgggtggtgttgtcagctgcctcccaccttggcttcagtagctcacccagctcacaggggagctgccctgggctggagatgggcatgcaccctgggtcctacttgaatgaatgcagcttgaggagagccggccatatacactgggccacaggttaccctcggcaatgcccacatcagccgtcagcctgagcctccccaggagagcaaggctcacacgacaaaggctgcccgtggccaatgaggtggctgagcccagccaggacctttctcggactcccgggatgtggctctgctcgtgagctgcctggtcagctctctcggggtgagaggggcttgtcacacgggcccctgcctgcagtgtgacccttctcagcttctctcagcagccctgcctgcggagtgtcaccgccaccatgatcatttccctgacactgcgagggtgtggggacgtcctgggtagagacagggcccgtggcagcagcaggctcaggggcgccctacactggtgggctggggacctggtggagaccacgccaagggctggacaaggggacgagcctccaccctggcctctccgcaggcctcagcagcccctcccacaggcagaagggttgacactgggttctgccctcactgcaagagctgcaagtgccacgtgctgttctgcccaatctggtgtctgcaggtgaggaaagggctgccgctggcccgtttctgagtgttcagcacctaaggatgacagcactgtctgtccctaccctccgggtcctgtttgaaaatcaaacccatgctcacaggccaatttttttttcttttagagacagggtctcactttgtcacccaagctggagtgcagtggtgcgattatagctcaatgcagcctccaattcccggactcaagggaccttcctgcctcagcctgccaagtagcttggactatagctgtgtgttttcttattattttgtagacatggggtctggctatgttgtccaggctattctcaaaattcccggcctcaagcaatcctcccgcctcggcctctcaaaggttgggattacaggtgtgaggcaaggcacccagctcagccacagagccctattgcatctctcttactaggagcaagagctgactgccccctcatccccattccagagtgttggggctgtgttcagccgaggccgggccactggcatggcccagggagcgggatcattcactgctgccccaaatctgagatcattccaccttgacaagacttcctcatccaatccctttacttgacagctggggaaaccaatgcgcacagagcacccccagctcactcggggtctcagagctgatccatgagcggaggctgagatcctgggatcttgtcccccagcctccctgcaaccttaatcccgttctgctgaaagagatggggccggacctcgaccagcagccctggcctggacatgactgtgctcatgcaggtattgaggccgagatgccccggcatcatatgtttttctattttcttttttttttttttgagacggtgtctcactctgtcacccaagctggagtgcagtggcatgatattggctcactgcaacctctgcctcccggttaaagtgattctcctgcctcagccttccaagtagctgggcctacaggcttgtaccaccacacctgactaatttgtgcatttttactagagacggggtttccccatgttggccaggctcgtgtcgaactcctgacctcaagtgatccacctgccttggcctcccaaagtgccaggattacaggcatgagccatggcgtcacttaaatgtagtgagaggccgggcacagtggctcatgcctgtaatcccagtactttgagaggacgaggctgtcagatcacctaaggtcaggagttcgagaccagcctggccaacatggtgaaaccgtgtctctaaaaaaaaatagaaaaaaatagccctgcatggtggtgagtacctgtagtcccagttactcaggaggctgaggcatgagaatcgcttaaacctcggaggcggaggctgcagtgagctgagatggcgccactgcactccagcctgggtgacagagcaagactttgtctctaaataattaaataaataaatatggctgagcatggtgccttaggcctgtaatcccaacactttgggaggctgaggcaggtggttcatgaggtcaggagcccgagaccagcctggccaagatggtgaaacactgtctctactaaaaatacaaaaattagccagctgtggtggcaggcacctgtaatcccagctacttgggacactgaggcaggagaatcacttgaaactggaagtcagaggttgcagggagccgagattgcaccactgcactctagcctgggcgatggagaaagactccatctcaaataaataaattaataaatacagagcaagattccatcttaaataaataaataaataaacatacacctgtaatcctagcagttcgggaggctaagacaggtcgatcacctgaggtcaggagttcgagaccagcctgaccaatatggcaaaactccatctctactaaaaatacaaaaattagccaggcgttttgatgtgtgcctgtagtcccagctacttgggaggctgagacaggagaattgcttgaacccaagaggtggaggttgcagtgagccgagatctcggctgcacttcagcctgggtgacagagtgagactgtctcaaaaggaataaaaaaaatacaaaataaaaaaaatgtagtaagatggcagagtcgtgcccgcggaagcgtgctggtcctatccatgtagtgaaggctgatttcatacagaaatgtcacaagaactttttttctttttctttttttttgagacggagtctcgctctgtcacccaggctggagtgcagtggcgcgatctcagctcactgcaagctctgcctcccgggtttatgccgttctcctgcctcagcctcccaagtagctgggactacaggcctgtgcagcagatgcaggggggccactaggcccaggcagtcttgggacttgtgtgtctcctgctgtgcatccatactgggtgctttagaaacggcaggcagaccagaagcccctgttgcaagtgaggacaaagtgtgggaaggccgtgagggtctgcagtccgagatggcctggtcctcaacctgcagtgcactgttgatgcactggaatgccgcctccttctcccagtccaggtcttcagcagtgacccggtaccccagctctaagggaggtggcagcatcaaaggctcccctcgcctgcgtggcagcaggggaaacttgcatctacggggcctagaggcctgggatatgggggagccacccctgggagcgagtgtctgccctggtgctgtatctgccgtcttttcacactgggtgtgacccgaagagacagcctgaggtccgtcctcactcactgtgtttgaggaactgagggtcagctggcagtgggatgaggctggcccctcttccactttcgttccgggaggcctcccgtagagctgtaggggctcgagatggcatttcatttggggcacgagctggtccgggaggtctgcgatctctggttctgacctctgggcacctgctgcagctgtggctgaggcccagaaatgtgaagggcctccatccactccagtagtgaccccaacgtggggttcaatgcggaggggggaggggctgctgcggcagctgcaggagcagaagtgccacgccttgttcttctcatgcccgcatccatgcttgcagctgggaagggggcaggaatcagcgaggtgacctgggctgagtcctgggaatgggaagaggtggcaggaaggggatctgaggaggagaacagggggcctggtggtctgtgcttcttcccagacatgggagctgtagaggggacctctgcagcagatgctaagggggccagtaggcccaggcagtcttgggacttgtgtgtctcctgctgtgcatccatactgggtgctttagaaacggcaggcagaccagaagcccctgttgcaagtgaggacaaagtgtgggaaggccgtgagggtctgcagtccgagatggccttgtcctcaacttgcagtgcactgttgatgcgctggaatgccgcctccttctcccggtcaaggtcttcaacagtgacccggtaccccagctctaagggaggtggcagcatcaaaggctcccctcgcctgcatggcagcaggggaaacttgtgtgtactgggcctagaggcctcggatgtggaggagtcattcctgagggtgagtgtctgccctggtgctatatctgctgccttttcacactgggtgtgacctgaagagacagcctgaggcctgtcctcactcactgtctttgaggaactgagggtcagctggcagtgggatgaggctggccccctcctccgctttagccccggcaagcctcccgtggagctgtaggagctggagatggcatttcggttggtgcaggagctcgtccaggaggtctgggatgtctggttatatctgatttctgacctctgggcatggaggtctgtctgcagaggcccgggcccgggcacaaagggagagaggcctccattgtcccgcaggggccgaaatgcagacggtgcatccccggtgacctccgggacccttctctgatcaccaggattctcttggactctagggtccttgtcctgctcaggcatccctgccccgctctccttgagggccctcaacactatcttccctggacacaagtctggggacagccgggtgttgtggaccccaaaggggtgactcccggctcctgggccccacagagagtccatgttctcagtgcagtggctgagctggaggacgccctggaactcggagcacacagcactggcttgctgtggtacctgtgcaatcaaattgaaggcaggatcccaggaaggaacgcagcgcttgcaggatcaccgaaaaccttcttagagttgtcttgacaccactgatgtcaagtgtctgggtacttgtaggatggcctgccactcagtgcacgggcaggagcaacggggagatcccacaggcaaagtgaactgggggatgggctgaacgggctccaggcaactgagccctactggcaggtcctcggcctgggcccgaacaggaaggaggggcacagagtgcccaggtaaccgctcctgggagcagtggggaaccgtcggttgcttgaactctcgagagctgggctctgagcgtcctcgtccagccgccaactcggccaacggctaagccagcagtttcttctgttgccgggcaacgcgccttttaaacctgagggagcgggcgcgtgagcacatcacggcgcccgtgacagagccagcttaacggattaataagcgcagccaggtacccgcgcgaggcacttgctggcaatggcgggaggcggacgtggggggtcatgcaataggtactggaaggagagaggcgggcacaaaggtcgcgggaggaacaggtgcccacaatggcggcagatctgcccgtggatcactgaagattcctgctctcctgctgaggtggagattgcagtgagctgagatcgcaccattgcactccagcctgggcaacagagtcagactctctctttttttttttttttttttttttttgagatggagtctccctctgtcgcccaggctggattccagtggcctgatctctgggctcaccgcaagctccgcctaccgggttcacgccattctcctgcctcagcctctggagtagttgggactacaggcgcccgccaccacacccggctaattttttgtatttttagtagagacggggtttcaccgtgttagccaggatgatctccatctcctgacgtcatgatccgccctcccaaagtgctggcattacaggcctcggcctcccaaagtgctgggattacaggcgtgagccaccgcgcccggtgttgaaactcccttgaggcattttcttcggccttcgggtccatcctctgtctcctccttgacctcctcatctcctcctcgccactgccttggggaccttggccaggctcatggcatccagcagccactcaatgtcaatacctccatgttcatctctcagcccgcccttgcccgtgaacccatgcttatttatttattttttttatacgtgcacccatgctcttcaggtctgatgaagtatccaaaatcaagctcctgaccatcctcaaacctgccccttctgcagggtttacctcgctagtcggcgccatccttgattcttctctttctcccacccaggccatcatctcttgcctggttgatacccacagcctcccctttgggctttatccttatccccgtcatagctgccagagggaccctgtgaaaacactccccagcctgctcattcttctgccctaagcctgcatggcacagagcaaaagccagttgttatgggacctaggaggtcctgtgggatgggccccagcctgcatcttcatcctcttctccccaccccactccattcactctctgcctatcgctcaccagcctataccacctgcctcagggcctttgcactgaccatttaggcaacattccaggctcttttcacacgttgcctcctctgagaagccctccctgaccactctgcccatacctcatgcctcttgattccccttacctggcttgtggtttcagcactttccctgtgtgtgtttgtttttcttggcatgagggcaggacctaagtgtctgttccctgttgattccccagttccaggcatgcagtgcaaattctagaaatattttttgcatgaaggaatgagtgattgaatgcagcaagggtctggaggctgaggaccaggcagacagacattcagagttgctggaatgcgacagagacagggagtcagactggtcatgcaagatcctgggcctgcccttgggtcctggggagccacggaaggttgtgggtgccagagggttgtggtcagagccacagtcaggggccttctgagacctgtgtcccctccccaccctccctccccacctcctcaggccagctctggggtctcggcaggtggtccacaacatgacctctgagttcttcgctgcccagctccgggcccagatctctgacgacaccactcacccgatctcctactacaagcccgagttctacacgccggttgatgggggcactgctcacctgtctgtcgtcgcagaggacggcagtgctgtgtccgccaccagcaccatcaacctctagtaggggctgctgggccgcctgggtgggaaagggccaggggcgggtggcccagggactgcccacttatccagtaaggtggctccatcacctcttttcctggtgggaaactgaggcccaaccttggtagcttatcctgggcctctcagtgagtatgtttgagcctcagtgggtggatagggaccaggctgggccaggcaaggtcaggtgctgtctgacctggctgggcggtagctttggctccaaggtccgctccccggtcagcgagatcctgttcaatgatgaaatggatgacttcagctctcccaacatcaccaacgagtttggggtgcccccctcacctgccaatttcatccagccaggtatggggtggaggtctggggatgggggactggggtggagaggggcgggtgtcctgggcaggcagctgacgggcatccctgtcttctcccatcggccacagggaagcagccgctctcgtcaatgtgcccgacgatcatggtgggccaggacggccaggtccggatggtggtgggagctgctgggggcacacagatcaccacagccactgcactgatatgtgtcaccccttttctccctggccgtgcccaccctgcacagcccccaagccatgctgatcacactcccatgccccaggccatcatctacaacctctggttcggctatgacgtgaagcgggccgtggaggagccccggctgcacaaccagcttctgcccaacgtcacgacagtggagagaaacattgaccaggtgggccgggggttggagaaactgagtcacggtgtggggccccagggcatcctgggctggaggcctggatcatcacagagtggacaattgttggtgtcctctctctagtgcctgggccatctggagcccctgtgccatgagggccaagccccctgctccagtgagacccagcaggccccaacctgctcttcctgatgacctggcccgaaatggcaccacctgggctgaggcctgtgaccacacaggtgtggttcaggtggcatctggagccctgctcaggcttcccctctcctcccacccccaggcagtgactgcagccctggagacccggcaccatcacacccagatcgcgtccaccttcatcgctgtggtgcaagccatcgtccgcacggctggtggctgggcagctgcctcggactccaggaaaggcggggagcctgccggctactgagtgctccaggaggacaaggctgacaagcaatccagggacaagatactcaccaggaccaggaaggggactctgggggactggcttcccctgtgagcagcagagcagcacaataaatgaggccactgtgccaggctccaggtggcctccctgccctgtctccccactctctgggcctcagtgtattgtgtgtgaaatggagccatctgactggggaggaacagagaggtgggattcggagatcttcacaatgcggacactggaactagcctcagcatcttcagcatggggagagccaggcacatggctgggggccaggggaaggttcacaccaagccctgcccctttccaccctgatccctcggactttggggccaggccctcccttactggggctgggcagtgacactacctaggatcagccaccagggggtgccacgaccctggcactttcttaggcagagggtggccagctgatgctgggaacccgggcgccttctcagacccgtaggcgtccagctcaccctgccgatgacactggaggtgaagctgaggtccgaggaatggggactgggcaacaggctggaggaaaacatctcggtcagagccacgcccctggggggtttccaagagcaagcccagagtgaaacccaagcttgtgatcctctccagagggaggcctggttctcagggaacagcaaacgggaagatgtccccagatcccagggatcagggcttggaccagccggggacgcagcccagagggagtgggtccagaaggaaacagctagacacagcagccttcaccatccgcagcccctccaggcctccctcggggcctgctccctcctctgtgcacagttccaacacctggggcagggttctgggaagggctggtggaggtgggctggtgggaggcggtgatcacagcccagcacctggatatcaccaggggcactggggccaggggccaggtgaggccaggtcggggctatccttcaggagccccgaaaacctggtgattccaaagggcccatagacaaacaggtttttatgcctgtggagtcaagtcccactgggtctgagctctgcagggctgtgtctctggggctctgcaggggtgagatggaggtgggctcaaatggtgtacaagtcactcctcaatccttattttatttatttaatttttttaaaaaaaatttaaaccaatagagatggggactcactatgttgaccaggctggtcttaactcctgacttcaagcagtccccccatctcagtctcccaaaatgctaaaattacaggggtgagccagtgcacccagcctcaatccttattttggcctgagaggaaaggccgtggccccatttgcaggggagaagactgaagctggaggggcaggccttgctctgggttgcacagcagcaagagaagtgggagctggccacgaggcttcctcgactcgacacactggtggggtacaccctggttctccaggtcccatggggctcagcccaggactacctcggggggtgaggtacttaaatcctctccttcattctcatcgccctttcccccatcatttcctgaggaagaacattcagggacctgaaggggtggcctgcccctccacatctgtgggtgtttctcatcaggtgggacaagagactgagaaaagaaagagacacagagacaaagtatagagaaagaaaagtgggcccaggggacctgcgctcagcatacggaggccccacgctggcaccagtctctgagttccctagtatttattgatcattatctctaccatctcagagagggggatgtggcaggacaatatggtaatagtggggagagggtcagcaggaaaacatgtgaacaaatgtctctgtgtcataaacaaggttaagaaaaaggtgctgtgctttgatgtgcatatacataaacatctcaatgcattaaagagcagtattgccaccagcatgtcccacctccagccctaaggcagttttctcctatctcagtagatggaatatacaattgggttttacaccgagacattcctttgcccagggacgatcaggagagagatgccttcctcttatctcaactgcaaagaggccttccttcctcttatactaatcctcctcagcacagaccctttacgggtgtcgggctgggggacggtcaggtctttcccttcccacgaggccatatttcagactgtcacatggagagaaaccttggacaatacctggctttcctaggcagaggtccctgcggccttctgcagtgttttgtgtccctgcttacttgagattagggagtggtgatgactcttaacaagcatgctgccttcaagcatttgtttaacaaagcacatcctgcacagccctgaatccattaaaccttgagtcgacacagtacatgtttctgtgagcacagggttggggctagggttacagattaacggcatctcaaggcaaaagaatttttcttactacacaacaaaatggagcctcttacgtctacttctttctacatagacacagtaacagtctgatatctctttcttttccccacagggaccttcctggctgtgcctcgggtcaggaccagaatgacacccattcatttccctgggcctttgctccggtggtccctgcaccctggcctctgcctgacgaggatggtggggagaggaggggggacgtcccccacactgctgtctccactgttcctgctgcccaggcctctgggcttccaggactacagcgggtgggtgggtgggctggcctgagcccaggaatgcacttcagttcctggttgagcaatgtcactgaggcttgggagtcgggtgggggcgggaggaggcgtccacaggccccccctaccgtgagaggcagccgtgggaacagcctacctctaaacaatcactgcagcccaggctgaccaggggctctggccggacataggggcctggcaggctgtgtgccctgtaaggacacagtctgtctctgtgcctcagtttctctgctgcccagatggaggggcccagactccaggtgtacacatctggagcaggcagtgttcagttggggaggaagcggggaggactgtgggggccatgtgggaaggattccaccccacatcacctgcacccctgctgagcctggtcaacggagcccctcagtgggtcctcactctcctggctgcctcccatttaggcaccctgaggcctggggagaacagagccaggccagtgtccctagagaggctgcgctgccagcacagtagtagcggatttggattcagggaagcagacctgcagccagggtgggaaagagctgcaggcggggtggagcccccacatggcacagcccccctccctggaggtccatgctgcatttccaggacagcaagtcccagggatggatggtgcctggtgccaagggctagaggcatggtctgtctgcattccctacaggggcatcttgtagtcaccagcatttgatgctgtcaagtccccctgtcctctgtgcagactgggaagcccttggtcaccctggggggtggggggacccaggccaggctgcagaagcataaggacttgaacccgggtcctgagtgacaccaccttgggtcctcctccctctgcctctgttcagctccaccttgatgctgactaggctgggccatgcggagagggttaggggatagagatgagagctggggagcagggctccactctgggaggggggcagccttgcgggatccagggcagagttaagcggccccagctccgctttcctagagctgctgagaacccgggaaatggtgtggaggttccggggagccctgcccctacctggcaaccgcagtgcaacaggcaccaagttctcctgcacattgcgacagtgggaccctgggctctggcgggcggtaggtggggcctttggacctaccagcagtgagggagttaacacagcagctgacttctctaggcaaggaaaactcccctcagacgctttgctgcctggcctcctgccagcaacaagcaggagctgaaaactagaagctgaggcatgagtttggtcactccgtagtgtgcacttggtgagggcagcagctggccacagctgccagccgtctgtccattcgcccatctgtccatctggcagcccgctgttcagacctgtctgtctgtccgcccatctgtaagcccatctctgtcccattgtctatctgaccatctttctcttactgtcctctttgtctagctatctggcctgtctgtcgatccatcttcgtgtctgtcttcagcccccacctgtttgtccatctgtccaattacctgtgagtctatctatgcatcttcttgtccattcatctgcccacccatctgtccctccgtctgcccaccggcctcccctctccttctgggccgcagagccacggcccaggactgcagagccatggttggcctggtcctgctggggctggggctggcgctggctgtcattgtgctggctgtggtcctctctcgacaccaggccccatttgacccccggcctttgcccacgccgctgttgctgctgactccaaggtctgctcggatattggacagtgagtgagatgtgggaggaagctgggtggcccttggcagccagcccctcctggagaaggcgtgtgtgtgtaagcgtgtgtgtgtgtgagagattatgtgtgtgtgtgtgggtatgtgagtgtgagtgtggggtgtgggtgtgtgtaaatgtgtgtgatcgtgtttgggtgtgtgtatgtgtgagtgtgtgggtgtgtgggggtatgtgagtgtgagtgtgtggggggtgtgggggggtgtgaatgtgtgtgattgtgttttgctgtgtgagagtgtgtgtgactatgagtgtgtgagtgtgtgttggtgtgtgggtgtgtgtaaatgtgtgtgattgtgtgtgtgagtgtatgtgtgggtgtttgtgggtgtgtgtgagtgtgtgagtgtgagtatgggggtgtgggtgtgtgtgaatgtgtgtgattgtgtgtgggtatgtgtatgtgtgggtgtgtgtgtgcatgtgtgtgtgtgtgcgcgcacgtgcactggcccaggaagcaggagccgtgtgtgtgggcttcagcacctgcaggacttgagcgcaaggagacagcctcagggcccttgcacagaacaggtggcagggtgtgcccgtggggcagatggggacttggggacaatggtggtgtgtgagtccatacctggctccaggattcaggaggcccatttgcatatcccaggtgggaacctgtctggccccggctgaccctgctggccggtgcaggccccttcagtgaggccaattctccaaggctgcggtcttctcccagggtcatgggtgaaggggtttggaggctccctgcgtgggtactggcctgctggggtacacacaatgctgccatagccagtctgcccctacacccagcccggggccacatctcaggtctctcagtcctgaggagcccggtgccccacccctcacatcctctctccctgagtcagggcctgggtctcgtgagctgagtgactgatacttggtgtcctggatgagggcgtggtggagaggggccacagcgggtgtttcctgaccctcttccaggaaggtgctgctgccgctgcagggaggacacatacaggatgccccttcctgccccctgcctcccattgggcccacaaaagccagggcaagcctcccctccctgccagccacctggtctgcttcccagaaattctgtcttgcaggctgttgggaggatcccagtactttgtaaactaaagcaagggaggagtggccgttctctctctttgctcattcattcaccttttcattcattccttcttccctccattcccccatctgtccatccttccctgccctgattgctcatgccaccccccctccagcccctcctgacctggtcctttggtttctcttcagggctttctgtctcctcccacagggctgagaatggcagctcagggacaagtgggggctggggactgcttagtctccccagtggctctcaggggatttgagggtttgacgccagctgccaccccaggctgtgcccctcctctgctcaggaggacatgcagagatgcgacacccacttaaactcgaagttgcaaagatgcaaatgagactggggtctcaggcaccagagaccacccatgggcacgtggcttttgggagtggggacctgctgccacagatctctgaagagtctggacctgctgggtctccccgagtgactgtctgggggtctccatagcatgccctgctgtgtgcgcgacggtcactggttgggtaggggtctctactctaaagctccctctgccggcatcccctcgaactctcccttggtgaagagaggatgtggttttcccccagtgttttatcaaacaactctctccacttcctgttttaagaagctgggagtggaagagagcctggggctggccccagctgctgctgcgaaacaggggtcactggacgctgggaccctggccgggctggctggaggcctcaggaagaggcctgctacagtgtcatcctggccaagattcctccctgcagaggaccctggccacactgccacagggtctgctggggccaccagaagcccatgctcctgcctccatctctcccctttgtgctcacctctcaccaggaggccctcccagagttcagtctcctgcttttctttttttttttttttgagatggtgtctcgctctgtcaccaggctggagtgcagtggtgcgacctcagctcactgcaacctctgcttcgttggttcaaatgattctcctgcctcagcctcctgagtagctgggactacaggtgccagccaccacgcccagctaatttttgtatttttagtagagacggggtttcaccatgttggccaggatggtctctatctcttgattcgcccgccttggcctcccaaagtgctggcattacaggagtgagtcatggcacccggcctcatctcctactctttcagcaccaggttttattcttgggattctgctacagccgcagcccctgggtgcgagctcctaagctttctgcgagtgtggacccagcaccgtgcctagtagacatacaaaaggaacatggtgacagtgaggtctgtcatctccagcataatgactcttttgatccttgtaaaaaaaggtgatttttggctgggtgtggtggctcacacctgtaatcccagcactttgggaggctgaggggggtggctcacttgaagtcaggagttggagaccagcctgggcaacatggtgaaaccacgttctcctgggtgtccaggtggtccaagaccccatgactatatcatgacaggaaagagagagttaataaatctgagggcataaaatgtgaacatatactgtttccatcccacatgaaggcacatgtgtctgagcctactctctgggaggaatagagatctcagtttccacatcagggttgcattctatgcacctgcagccatgttattctgctgtagcagatgctacacttggcaccgacattgcagatgggaccatgaccttactggagttgtagaaatctactttcaccttccagaatccatttaatgtttataggagctagtccaagaaattagatggaaataaagtcctgctacaacctgagaatctttaggcctttaaaggtaacactattacatgcaactcccaatgaagggtgaagcatgattattatttaccttttttgatggggtgaaatggggagagagtcggaattcatcacatacataaaaggcaggtcgtataaatgttagtgtttgtgagtcacaaggtctgtcttgcagcgactcagatctgcacttgtggcatgaaagcagccattgactgaacataaatgaagggatatgggtttgtttaatgaaactttatgtacaaacgtaggtagtcactatggtttgctgaccccagcttttccattgccccatggaactttctttgggatgcctttttgcagtgggttctaggtgagaaaaattggctcggatctggatgctgaagttgagactggtgctgtcatgtggctactgccctcgtccatcctgggtgacttctgactgttgtgatgagcagggccctttgtggctgcctagctcctggtgccaagaatgatgaaccctctgcattgccctctgcaaagcagaccacaggacagccaccctgaattgctcgttctcactgtgtccaccttgcctaagatggttgggcacattcactggctggttaattccagatagtgttatctcattaatgccaggcagtaccttctagaagaggctcctaccatctgcactagactatggagcttctccggggtgctagtgctctgtcacctgaatatgcttcagggatttgctaaacagaatgtccttcaggccctcccatagaacacagggaaacattttgttttcccttgtgtgactgcaaaagggaaaacaaaaataagcctgggaaagggtgatttaggactttgatgatgtcgaggctgggaactcccatcagagtttctatatatgatggggaggggccaattttttgaaagtcagcattgactggccattggacacaggtggccctacattgactctctcttgcccaggacctctcctcaaaaagtctcaggtgattcagccccacagcagcaggggcacgacaccttctgtcctgaaggctgataaccggtgatgtggacagctgccattcactctggggaagatgctgcctaattccacacccaccgcctgcatgtctagtgagagcctgcctattcctatggggacaccccaaaattagctccaccaagaagcctcctccacctccattctccacagaagacactcatcttatatgcttggctacaggtcctgtttgctctgctattatccctatcacctgtccctgtctgttcaattgtctcacatgagcagagagacgatgtctcattcagccttatttcccatgggtattaataaatattcattgagtcaattaaaaattcatgtaataacctatcaatgcatgtctctgtgtgaggtaaagaaagcatcctgattgtaaatataactctcatgttaaaagctgggagcagtggctcatacctgtaataccagcactttgggaggctgaggagggtgaattacctgaagtcaggagtttgagaccagcctgatcaatatggtgaaaccccatctctactaaaaatacaaaaattagcagggcatggtggcgtgtgcttgtaatcccagctactcgggaggctgaaacaggagaatcacttgaacctgggaggcgaaggttgcagtgaaccgagatcatgccactgcactcctgcctgggtaacagagcaagactccgtctcaaaacaaacaaacaaaagcattcttacagattatcttggcttttattcctttattctaccaataagttgttagcctctcttatgtgccatttgttacaaaaaatcagctgtcatttttatggagactgagaagtcccctgatctgtccattgtaagctgaagacccagtagggccggttttatggattagtccaagccccaaggcttgagaaccaggggagccactggtctaagactcagtccaagggaaggagaggatcaaggtcccactcatgcagtcacacacaaaggaggaattctccctgctggtgccttttgttgtatccacgccttcagtagatttgatgatgccaaccacacagaggagggcaaagtactaacttagtccaggcattcaaacatgaatctcatctggaaacaccctcatagacacactcagaaatagtgttcaatctgggcacctcatggcctagtccatttgacccataaaacttaccattactatcattaaaatggcatacgttatgtatattttgttaccataaaaaatttacattctgaaaataaagtacagtgtcttagctcatttgtgctgctacaacagaatacttgaggttgagtgatttacaaagaacagacagttatttctcacagttgtggaggctgggcagtccaagatcctggtgagggcttttatactgcattctcatgtggcaaaggcagaagggctggagaaagctaaaggctgcatgaagcctctttcctaagggccttaatcctctcaagagtgaggagctgtcatgccctaattgcctcttaaaggccatctcttttaacactaccacactggcaacatctgaattttggagaggacacattcaaactatagtagcaagtttaatttggaaataattctactcaaaaaagcattagaattgagtaatgaaaccctgtatatcccctccctggatgcaacaatggggtacgttgagtccaatccagggagcattctcgcttcctctctctactccatcttaaaaaattaacaataattttctgtccactccataatcccatttcaccaattgcccaaaatacctacagtagttatttaattatgtttactaacagaatcctcaagattccaacccttatatttgatttttacttctctctgatcgatctggcatttatcgacgaagattccatcaaaccctgggcttatgaaaaattttgcaaaaattccacagataggaaagtgttcattgtgtgcagcagaaaaatgttcatcatgcagagtggaaacatgtttatgtgtggcaagcaatggtaaagtgagtcctgcattttaaaatgaaaggacagtagatggaaattagaggtcacactgtgaaataatgaattctgttaaaggcaacaacataggttagtataaaaggcagcattatggtatttttggttagtaacttctctttggaaacctatcacaagcagagagactgaatccataattaaaaccttccagccaaagaaagtccaggaccagatggcctccatgttttttatatcagccatttaaagaattagcatcaattcttatcaaactctgaaaaactagaagaggaagaaactattcctaacgagcccaacatgaccctgaccgaagtcagttaaagaccctacaagatgtgacaactaaagaccaatatacctcgtgaatataggtgcaaacatcctcaaaatgtgtgccagcaacatgaatccaacagcatattcaaaagattatgtcatataactaagtgagattaatatcaggaatgtaaggagggttcaatataagaaaatgaatcaatggaatatacaacattaatagctcaagagagaaaatacatattccaaataacatagaacaacaaaatccaacaccttctctaaatgaaaaaaaaaaagcacccagaaaactagaagtagaaggaaacaacctctgtgtgataaaaggcgtttgtaaaaatcccacaacaaacttcatactcaataatggaagaccgaaagctatccctctgacatctccggatgcctaaccttatttaagtgagttcagcaaagttgcaagatgcaagatcaccatgcaaaactcattcatatttttttttggggggggatggaatcttgctctgttgcccaggctggagtgcagtggctcaatttcggctcacctcaagctccgcctcccgggttcacaccattctcctgcctcagcctcccgaatagctggaactacaggcgcctgccaccaagcccagctaattttttgtattttttagtagagacggggtttcaccgtgttagccaggatggtctcaatctcctgacgtcatgatccacctgcctcggcctcccaaagtgctgggattacaggcagagccaccatgcccagcaactcattcatattttatatgcaccagcaatgaacatctgaaaaagaagttttaaaagtaactctatttacaagaccaccaaaaagaatacaaataaatttatccaagaagatgaacttcttgtacactgaaaatgtcaagacatttctgaatgaaatgtgcagagatgcctcaggtggctcctgcatattccgcccctggtgaagcatgtttgcattttcttgggaactgagcacctcctgcttggtcgtaaggcagacaggccacacagagaagaataattcctccctttgggccagcagttcagggatcaagaaatcctagacctgaggagtaatttctgaatctacacctagaccaaggtggtgtctgagcctccagcagtcagtgaagagcaaccagcagtggtcaacagagagtcacatggcaaagccgcctggagctgggctggacctgcatgtcagggagatgctgacatgcagggagggtcagtgaccatgacctaacactggggggaaaaatgtccttctttttctagagtatcatcgttaacattgatgtacaaactcttttgccccatgtctcttacatctggctcttttagaatttgcttatttcacagcaacaagttcaagtcttatactacattgcatcccagcccacccaattatgctaaaactctggatctgtcaaacactttcagagcagcagatttgtacctggccctaaacgcatagtggggacactgaggcacagctcctagggccttcccctgaagctccaccaagggcaaaaacttatacaagcttcatggatattaaaaacctccatgttcacttagcaagggagaaattttattcaagttctgcagctcaggagctgtgctcaagagcaagacccagaacttctcaaagcctggttttggcacctgtagaatggagcccaaaaacgcagacagacttacctcggagctctatagggccaggacagcccaggagtaaagccagtttgagacacaatttggggtgaagatgtcggcccagaatagaaccaggagaggaagaagaaacccgtgtgctgagagtgggtctgctgggaccactcctctccttcctgggccctttggggctgagcccttctctaaaaaccacagagctactccagcagcagcccctgactctgctgatttgcatcatggccgctttatccagcaaggggataagagaggcctgggaggaacctgctcagcctgagtcttgggaagcagcatcgggggtgcctcagccatggcctggacccctttcctcctcggcctcctccctcactgcacaggtgctgcccccagggtctcactcacttgcccagccccaggcctctgggtccagcctggccctaacactgagctcagtagggccctacctgtggtgggcaggatgctcatgaccctgccgcagggcagggggctggtggggcagaaatccccccacactgtgctcctgttctcttggtgccctaagggcacttttattcctggggctcaggtcagttcaggcaagtggcaagatattctttggttaatccccagagtttcaggccttttcgctcctcttttctctccttgcaggctctgtggcctcatatgtgctgacacagccaccctcagtgtcagtggccccaggacagacacccaggatcacctgtaggggaaataatattggaattaaacctgcttaatggtaccagcagaaaccaggccaggcccttgtgcaggtcatctatggggatagcagatggccttcagggatctctaagtgattctccagctccaactcggggaacatggtcaccctgaccatcagtggagcccaggctggggacgaggctttcctctcaggtgtggggcagtggcactgcacacagtgacagaggcagacaaggaagtaagacacagaccccttccccatctgtgctgctgtcgtcctccagcccggcaacactgtggacaaagccatgagcatgcatgacccagttcacctggatctgagacccccagtctttacttccttcagccctccaggcaggctgtgcagagggggcatccagaatggatttagggctgaggtgaccaggatgtattggggttttgtggactccactgtgattcagggaaatta

SEQ ID NO: 566 - DNA, 2231 bp, Homo sapiens
agtgctacgcggaggattagagcaggcggtgcgctgggggcgggagcagcgcggagcccggctcggccacaccgatcgcccgccgccatgggctcctcgcaaagcgtcgagatcccgggcgggggcaccgagggctaccacgttctgcgggtacaagaaaattccccaggacacagagctggtttggggcctttctttgattttattgtttctattaatggttcaagattaaataaagacaatgacactcttaaggatctgctgaaagcaaacgttgaaaagcctgtaaagatgcttatctatagcagcaaaacattggaactgcgagagacctcagtcacaccaagtaacctgtggggcggccagggcttattgggagtgagcattcgtttctgcagctttgatggggcaaatgaaaatgtttggcatgtgctggaggtggaatcaaattctcctgcagcactggcaggtcttagaccacacagtgattatataattggagcagatacagtcatgaatgagtctgaagatctattcagccttatcgaaacacatgaagcaaaaccattgaaactgtatgtgtacaacacagacactgataactgtcgagaagtgattattacaccaaattctgcatggggtggagaaggcagcctaggatgtggcattggatatggttatttgcatcgaatacctacacgcccatttgaggaaggaaagaaaatttctcttccaggacaaatggctggtacacctattacacctcttaaagatgggtttacagaggtccagctgtcctcagttaatcccccgtctttgtcaccaccaggaactacaggaattgaacagagtctgactggactttctattagctcaactccaccagctgtcagtagtgttctcagtacaggtgtaccaacagtaccgttattgccaccacaagtaaaccagtccctcacttctgtgccaccaatgaatccaactactacattaccaggtctgatgcctttaccagcaggactgcccaacctccccaacctcaacctcaacctcccagcaccacacatcatgccaggggttggcttaccagaacttgtaaacccaggtctgccacctcttccttccatgcctccccgaaacttacctggcattgcacctctccccctgccatccgagttcctcccgtcattccccttggttccagagagctcttctgcagcaagctcaggagagctgctgtcttccctcccgcccaccagcaacgcaccctctgaccctgccacaactactgcaaaggcagacgctgcctcctcactcactgtggatgtgacgccccccactgccaaggcccccaccaccgttgaggacagagtcggcgactccaccccagtcagcgagaagcctgtttctgcggctgtggatgccaatgcttctgagtcaccttaactttgaaccattctttggaattggcgtggtatatttaaccacgggagcgtgtctggaaacgcaaactatcattaatttcatactagtttgtaccgtatctgtaggcatcctgtaaataattccaaggggaaaactaaacgaggacgtgggttgtatcctgccaggttgagtggggctcacacgctagggtgagatgtcagaaagcgcttgtattttaaacaaccaaaaagaattgtaagggtggcttgctgccaggcttgcactgccgttcctgggggtgtgcatcttcgggaaaggtggtggcggggcgtccactaggtttcctgtcccctgctgctccttccgtaagaaaatgaaatattctatgcctaatactcacacgcaacatttcttgtactttgtaagtcgtttgcgagaatgcagaccacctcactaaactgtaaacggtaaagagatttttacttttggtctccgtgagtcgcatctctactaaggtttacacaggaattccacctgaagacttgtgttaaagttctacagcgcgcactgttaactgaacgtctttttcttcagcctatacgcggatccttgttttgagctctcagaatcactcagacaacattttgtaactgctgctgtcgctttctacatacaccttataaagtgacatttcaaaagaaataaggtgccacagttttaaaccagaaggtggcactctgtggctccttgtagtattatagctatactgggaaagcatagatacagcaataaagtacagtaatttt

SEQ ID NO: 567 - DNA, 700 bp, Homo sapiens
tggtcttgatctcctgacctcatgatccacccgctagcctcccaaagtgctgggattacaggtatgagccaccgcaccgggcctgttctatttttctagttaagggaactgaagctcagagaggtgtcaccagcaggtgttcattcccatgccagccttgccccccggcttttcccaggcaggctcctgcgtgcccactggctccagcctggtcctctgtctcttggctgcttcactcctgctctttgtcccgactctggccctgcttacaggggccactacctgctggtgcctccataacaagcgtctggcgttgagacccctggcatggcaggggctttggggtctggtttccacaaggcttagccatggcagaacctcgttttattttaactctttgcccctacaaacaaacagcagtacttgccagaaccattcttgggattcaggagctcgggcgactgccttgcctctggccgcacccaggagggtggggttggatctgtgtagttgccaggcccacacctgccagcagggggctgactggatccatgctttactgtgtttaatgggggtaacaggggtccctacagccctcccagctaaacatttggaacaaaacaccagcccttttgtagtggatgcagaataaaattgttaatccaatcacctacaaaaaaaaaaaaaaaaaaaaaaaaaa

SEQ ID NO: 568 - DNA, 2119 bp, Homo sapiens
gcaagccggagagaagagagagcccggccagacccactgcgatgagacaggacgcgcccaagcccactcctgcagcccgccgctgctccggcctggcccggagggtgctgaccatcgccttcgccctgctcatcctgggcctcatgacctgggcctacgccgccggggtgccgctggcctccgatcgctacggcctcctggccttcggcctctacggggccttcctttcagcgcacctggtggcgcagagcctcttcgcgtacctggagcaccggcgggtggcggcggcggcgcgggggccgctggatgcagccaccgcgcgcagtgtggcgctgaccatctccgcctaccaggaggaccccgcgtacctgcgccagtgcctggcgtccgcccgcgccctgctgtacccgcgcgcgcggctgcgcgtcctcatggtggtggatggcaaccgcgccgaggacctctacatggtcgacatgttccgcgaggtcttcgctgacgaggaccccgccacgtacgtgtgggacggcaactaccaccagccctgggaacccgcggcggcgggcgcggtgggcgccggagcctatcgggaggtggaggcggaggatcctgggcggctggcagtggaggcgctggtgaggactcgtaggtgcgtgtgcgtggcgcagcgctggggcggcaagcgcgaggtcatgtacacagccttcaaggcgctcggagattcgatggactacgtgcaggtctgtgactcggacacaaggttggaccccatggcactgctggagctcgtgcgggtactggacgaggacccccgggtaggggctgttggtggggacgtgcggatccttaaccctctggactcctgggtcagcttcctaagcagcctgcgatactgggtagccttcaatgtggagcgggcttgtcagagctacttccactgtgtatcctgcatcagcggtcctctaggcctatataggaataacctcttgcagcagtttcttgaggcctggtacaaccagaagttcctgggtacccactgtacttttggggatgaccggcacctcaccaaccgcatgctcagcatgggttatgctaccaagtacacctccaggtcccgctgctactcagagacgccctcgtccttcctgcggtggctgagccagcagacacgctggtccaagtcgtacttccgtgagtggctgtacaacgcgctctggtggcaccggcaccatgcgtggatgacctacgaggcggtggtctccggcctgttccccttcttcgtggcggccactgtgctgcgtctgttctacgcgggccgcccttgggcgctgctgtgggtgctgctgtgcgtgcagggcgtggcactggccaaggcggccttcgcggcctggctgcggggctgcctgcgcatggtgcttctgtcgctctacgcgcccctctacatgtgtggcctcctgcctgccaagttcctggcgctagtcaccatgaaccagagtggctggggcacctcgggccggcggaagctggccgctaactacgtccctctgctgcccctggcgctctgggcgctgctgctgcttgggggcctggtccgcagcgtagcacacgaggccagggccgactggagcggcccttcccgcgcagccgaggcctaccacttggccgcgggggccggcgcctacgtgggctactgggtggccatgttgacgctgtactgggtgggcgtgcggaggctttgccggcggcggaccgggggctaccgcgtccaggtgtgagtccagccacgcggatgccgcctcaagggtcttcaggggaggccagaggagagctgctgggccccgagccacgaacttgctgggtggttctctgggcctcagtttccctcctctgcaaaacgagggggtcagcccaagattcttcagtctggactatattgggactgggacttctgggtctccagggagggtatttattggtcagggtgtgggatctgaggagtggagggaaagggtcctgctttctcctcgttcttatttaatctccatttctactgtgtgatcaggatgtaataaagaattttatttattttcaaaaaaaaaaaaaaaaaaaaaaaaaaaaa

SEQ ID NO: 569 - DNA, 1817 bp, Homo sapiens
gagttgctggtagtgcccgtggtgcttggttcgaggtggccgttagttgactccgcggagttcatctccctggttttcccgtcctaacgtcgctcgcctttcagtcaggatgtctgcccgtggcccggctatcggcatcgacctgggcaccacctattcgtgcgtcggggtcttccaacatggcaaggtggagatcatcgccaacgaccagggcaatcgcaccacccccagctacgtggccttcacggacaccgagcgcctcatcggcgacgccgccaagaaccaggtggccatgaaccccaccaacaccatcttcgacgccaagaggctgattggacggaaattcgaggagctcaatgccgacctctttcgcgggaccctggagccggtggagaaggcgctgcgcgacgccaagctggacaagggccagatccaggagatcgtgctggtgggcggctccactcgtatccccaagatccagaagctgctgcaggatttcttcaacggcaaggagctgaacaagagcatcaaccccgacgaggcggtggcctatggcgccgcggtgcaggcggccatcctcatcggcgacaaatcagagaatgtgcaggacctgctgctactcgacgtgaccccgttgtcgctgggcatcgagacagctggcggtgtcatgaccccactcatcaagaggaacaccacgatccccaccaagcagacgcagaccttcaccacctactcggacaaccagagcagcgtactggtgcaggtatacgagggcgaacgggccatgaccaaggacaataacctgctgggcaagttcgacctgaccgggattccccctgcgcctcgcggggtcccccaaatcgaggttaccttcgacattgacgccaatggcatccttaacgttaccgccgccgacaagagcaccggtaaggaaaacaaaatcaccatcaccaatgacaaaggtcgtctgagcaaggacgacattgaccggatggtgcaggaggcggagcggtacaaatcggaagatgaggcgaatcgcgaccgagtcgcggccaaaaacgccctggagtcctatacctacaacatcaagcagacggtggaagacgagaaactgaggggcaagattagcgagcaggacaaaaacaagatcctcgacaagtgtcaggaggtgatcaactggctcgaccgaaaccagatggcagagaaagatgagtatgaacacaagcagaaagagctcgaaagagtttgcaaccccatcatcagcaaactttaccaaggtggtcctggcggcggcagcggcggcggcggttcaggagcctccgggggacccaccatcgaagaagtggactaagcttgcactcaagtcagcgtaaacctctttgcctttctctctctctcttttttttttgtttgtttctttgaaatgtccttgtgccaagtacgagatctattgttggaagtctttggtatatgcaaatgaaaggagaggtgcaacaacttagtttaattataaaagttccaaagtttgttttttaaaaacattattcgaggtttctctttaatgcattttgcgtgtttgctgacttgagcatttttgattagttcgtgcatggggatttgtttgagatgagaaaccttaagtttgcacacctgttctgtagaagcttggaaacagtaaaatatataggagcttaaattgtttatttttatgtactactttaaaactaaactgaacattgcagtaatgttaaggacaggtatactttttgcaaacaaatgcataaatgcaaatgtaaagtaaagctgaaattgatctc

SEQ ID NO: 570 - DNA, 678 bp, Homo sapiens
atcccggtaacccgaccgccgctggtcaccatgaaccacattgtgcaaaccttctctcctgtcaacagcggccagcctcccaactacgagatgctcaaggaggagcaggaagtggctatgctgggggcgccccacaaccctgctcccccgacgtccaccgtgatccacatccgcagcgagacctccgtgcctgaccatgtcgtctggtccctgttcaacaccctcttcatgaacacctgctgcctgggcttcatagcattcgcctactccgtgaagtctagggacaggaagatggttggcgacgtgaccggggcccaggcctatgcctccaccgccaagtgcctgaacatctgggccctgattttgggcatcttcatgaccattctgctcgtcatcatcccagtgttggtcgtccaggcccagcgatagatcaggaggcatcattgaggccaggagctctgcccgtgacctgtatcccacgtactctatcttccattcctcgccctgcccccagaggccaggagctctgcccttgacctgtattccacttactccaccttccattcctcgccctgtccccacagccgagtcctgcatcagccctttatcctcacacgcttttctacaatggcattcaataaagtgtatatgtttctggtaaaaaaaaaaaaaaaaaaa

SEQ ID NO: 571 - DNA, 74371 bp, Homo sapiens
caagggtttgtaagatggattggaagtaatttctaatactgcaatgagtcagctaaaaacgttattaaggggatctgtggtttgtacctcctgtaaccaggcagcctgttgggtgatcttacctacatgggttgttaaatctcctataatgttgatataagtgcaacaagtggtgtgggctatcatgcaaattcccccttgtttagcaatgagaaaacctggtgcaatttgattgtctaaaaccacttgagtgagagaatttaaggacttctactgtgtcataatacttattgcagcattttcagcaatttgtcctatggtggccggcatttttttttatcatatctctgttagtgtatactccgtagctgagaaaaattataccccaaaaactatgctaccacatatcctgatatccacttggtagctctcttttaccttaccggaaagcaagattttctttatgattgagatggatggaaaagagggcaacgtaatgacctagaaggcaaagtccttcaacttgccagctgtttatgcatctgtgtgcttcttcttgaactgggggatctgactcaattctatataggaaagtgtgtcctcaaggggcacaagttatacctccaagggtatgccaatttatacgttcatttatgaacaagatatctattatgtgagtgaaccacgaactggttttgttgcaagccttctagaagcctgcagaggcatgatatctaacaaagaggagctgttgtcagtgtttgatattttttctttgggcattcagtggttatgtacagtagcaagggtgggagtcccagaatctaaggagaaagctacatagacataaaaatcttaatctttttaaaactcagttttctggtttggtgcagtggctcatacctgtaattccagcactttgggaggctgaggtgggagaattgcttgagcccaagagtttgagaccagcctgggcaatatactgagacctaatctctacaaaaaccttttcaaaagaatagtaaaattaccttttactcaaaagggtaagggttaaggtgtgggtttggtaacagaagtggtcaataaaactaaaattgtgaggagtgaaacagaggagtccattttagttataaaaaaattaaaccaagagagaaatcataaattccatacaaattgctgagggtcactatctagagtctgggggtattctttaaggtaatggagtatttgattaacaaggagcatggtaactatgttttctaaagtgaggattataggctctgggaaagggattttggacttggaggtggatgagaaattttagaagtatctaaaaatggaatacaagggtaagcattgtagcacaacataggatctccagaatacataatattcccaacgtcagggtaatcagtcaataacgcaggtacttgaggcaatggcaatggtaatttgtcttaagtcaaaagtgggcgagttaaaatacagccctggtccagcatcttggacaggcagtccacctcagctgtcatcttcttctcagccatgaggtggaaccctagtctaagtctggtgtcagatactggtgttgaggtccagtcttccgcggagggaagaacttcgttattccaagtgagaaattggtattcaaatatgttaaagtcttttcgatagaaagcaatttggattatagcttattgcaaatgtttttagagaagaattaaaaacagtaactgtagatgacaaaaacttagaatggctatggttaaaatctaatgaaagttctcaattgacaagaacatttagttatttacattatatgtagtattttaagataacaaccaaaattatgactgataacacattagatctttctgaatttatataaattttgaaccatttatatcaacaacatatcatagtgtaattaaaagaagatctagtattgcttattatttgacaatgtttttatataatttaccaaataagcctaatcatttaaaatatctctataaaatgagagatatatctgttgaagctttttaggggcccaattagaaaatcttaaagttaattctaagtaaaaagacttaatttaggattgattttgaggatgtttgtcaaagatgttaaaaggcccaaaatatttgatcaaaacaggatcacgggtcattgtaaaataatattcatttaaccgaagtgacaatcaaaagactttaaaagtaatacagaaagctacataaacataaaaatattaatcttcttaaaactcagttttctgacttggtgcagtggctcacgcctgtaattccagcactctgggaggccgagatggagaattgcttaagcccaagagtttgagaccagcctgggcaatatactgagacctcatctctacaaaaacctttaaaaaaaaattagcctaggatggtggcacatgactgtagtcccaggcgtttaactgtaggaaagaaagtcttgaagcagttaatgaggtaggggagttttgaggtgtgaccgaactcttaccttgccaaagccatagaatccagcttttaaagttttctggggtctcttttgcaacaaggagtccatttcatcttgcctggggacctacgggctttatttttatttcacagagggaaaaagggaacctcataactggtcagcatggataaaaattttgtcccctatttggccttctttaacaccacgttggtggggtcttggcgtaacttcttatagccgctcagtggtggaagtttaggctcctactcagcctttgctgaagtgggtggggccatagttgttggagtgtgtgtgtgtgtgtgtgtgtgtgtgtgtgtgtgtgtgtgtttggtgtttggctggggtagaacagttattgtctaagaattttatgtctttctaagctgtcctcttcctgatcctggtcctatgaatagagaaagcagacttttgctggggcttttaaaatctgcatccattggcatttccagattgccagcttcttcagttccaagtctggaatacaaaaggaaaaaaaaacttacgactgtgttgtaccttgagtcttgagatccctagctggtctgccttttgtctgcctttcattgtattacatttgttttatgtacaatgctttggggttttagcaggatgaatggggaatattacatttactccaccttcctggaagcagaagtatgtgtaatattttgaataaataccataaactattccatgcattcatgaaatatgcaatttctcattcaccaatgtaaatggcttgattcaccattatagaaccatgcataagtacaacaaggaagttttatttagggaaactcaagcaaaaataaaaaggcaatttgtcaaatgtaaaaaggtatttgcctgcaaatataaaaagtatagaccaagcgcagtggctcacgcctgtaatccctgcattttgggaggccaaggtggatggatcacctgaggtcagagttcgagaccagcctggctaacatgatgaaatcccgtctctactaaaaatacaaaaaattagctgagcgtggtggcacgcacctgtaatcccagctactcactcaggaggctgaggcaggagaatcacttgaacccaggaggcagaggttgcagtgagccgagatcctgccactgcactccagcctgggcaacaacagcaaaactccgtctcaaaaaaaaaaaaaaaaaaaaaagaagtataataaacactttctatgttccaaacctcttgctaagcactgttgtagctctcataacctatactatattgaggagcccaaattgctttcgaaagtatttctactttcaaaagtattaagtcttttgacttactttccatacagcaatgcaaataagcaactgctacgcacaacaaaatagatgaatctagaaacataatgagggtctttggccataccatcttgaacgtgcccggtctcctctgatcttggaagctaagtagggtcaggcctggttagtacctggatgggaacataaggaggaatgagaaaatcagtcacgtattattccattaatacaaagttgaaaaaacaaaacaatcgtaatattagaaatcacctcaaggctttcttctgaggacaagtgtgagagaagtgactacaggaggctctagaagggctttatggaacagtcctatttatagacatgtggtgatttcatggttttctttactttgtattaattcatagagctgtaaatttatgatttgggtacttttttgaaaatatactattttatctaaagatgtatttttaaaaaaagacgcacactattcagcattcaaggttaaataagaaaatacattacgtgggccgggtacagtggctcacgcctttaatcccagcactttgggaggccgaggtgggcagatcacgaggtcaggagatcaagaccatcctggttaacacggtgaaaccccgtctctactaaaaatacaaaaattagccgggcgtggcggtgtgcacctgtagtcccagctgctggggaggctgaggcaggagaatggcttgaacccgggaggcagagcttgaagtgagccgagatcgcgccactgcactccagcctgggcgacagagcaagactccgtctcaaaaaaaaaaaaaaaagaaaaagaaaaagaaaatacattatgtgaatttattctatatacttaaaatgaagattttgtcttttttcatgaaaatacaatgaggtaccaaattacagccataaaattgacaaaaatttttaaagttgtacaatgccaaatattggggacatgatacactgctggtagatgtgtaagctggtagaaatgctttggaaaaccactgggcaaaactatagaactgaagacatgaatccactaaatacttagcagtttgactcctaggtatgtaccctggagaaatatatgctgaagtgccgcaggacatatgtataagatgggaatatctgttttttctgggtttcagttattatgaacaatgaaccaaaactagaaatgctacaaatatccatcaatattaaaatgaataagtaaatcatcttatattcattaaatggaatagtaacccacaacataaacaaaatggataaatcttacaaatgtattattgaacaaaagaggcaaaacaaaacaaacacttcaatataactatatttatgaaagtaatcaaaataggaaaactaaattatagcacccaggcattcatacataagtggtaaagatataaagaagagtgagaaaattattattataaaaatcaggtaaatggagggggcgggcacagtggctcacgcctgtaattccagcactttgggaagccgaggtgggcggatcacttgaggtcaggagttcgagacaagcctggccaaaatattgaaacgctgtctctactaaaaacacaaaaattagctgggcatggtggcacatgcctgtaatcctagctactcaggaggctgagagaggagaatcacttgagcccaggaggcagagcttgcagtgagctgagatacccccactgcactcttgcctgggtgaaagagcaagactctgtctcaaaaataataataatagtaatagaaatattaataaataaataaaaatcaggtaaacagggctgggcacaatggtgcatgcctacagtctcagcactggagaggttgaagcaaaaggatcacttgagcccaggaattcaaggctgttgccactatgattatacctgtgaatggctactatactgcagcctgggcaacatagcaagaccatcttctctaaatacaataaaaataaataagataaacaatcaggtgaatggttaattccaaaagaaagtgaagggattgtaaaaatcaaaagagagagagggtttctgggatgttggcaatgttttcttaccttagtagtgattatatggattcattttataagcatttatttaaatctatgtatttacctcatgaattttctgcatgtatgttatatctcacagtttaaaaatgtttaattagtgaacagtagaaaattgatacagtcatcataagcatacatgcatctacaatacagtcttgaactacatcaaataggaaaaaatacataaatcaccaattgtagttggaaatgttttaatatgcatctctaaggactgtagatcacatagacctgaaaatagtatggatatgaatgagctgaaaagaaaaacaattttaaaaatatgtagacccaaaataaacaggcattatttttgaatatatatataacacttacaacaatagaccatgtgttaggctataaattccacagatctgatcccattcagacaatgttctcctattacaatgcatcctggaattaacatttgtaaaaacaatagctaaaataaaatcccatgtgtttggaaactaaataacatattactaaataagattctgcttaaaaaatacttagaagtgaatgaaacactacatgaagaatttgtgtactacaactaaagcagtacttaaaggcaaacttgcagttttaaatacactaatgattaagaaagattaaaatcaaatgagctgccacaggagatacaacctcacacccttcaggatagctgctatcaatcacacacacacacacacacacacacacacacacacacagagagagagagaataagtgttagtgaagacatggagaaattgaagcatttctgcactattggtgggaatgtaaagtgatacagctgctatggaaaacagtacagcagtcacttaaataattaaaagtacaattaccatataacccagcaattccacttctgggtatatacccaaaggaattgaaagcagaaacacaaacagatatttgtacactcatgttcatagcagcattgttcataataggcaagaggtcaaaacaacccaaatgtccattgatggacaatgactaaacaaaacattccattttaatagtattccattgtagtattcacatacaataaaatattatttatcctttttcaaaaggaatgaaattgtagtacatgatacaacgtggatgaaccttaagaacattgtgctggctgggtgcggtggctcatgcctgtaatcccaggagaatcatggggtcaggagatcgacaccatcctggctaacagagtgaaacccagtctctagtaaagttacaaaaaattagcaggacatggtggcaggaggctgaagtcccagctacttgggaggctcaggcaggagaatcgcttgaacccaggaggtggaggttgcagtaagccgagattgtgccactgcactccagcctgggtgactgagccagactccatctcaaaacaaaacaaaacaaaacaaaataaaacatagtgctaagtgaaataaacgagtcacaaaaagacaactactgtatgattccacttctatgagatacctagagtagtcaaatttatagagacggaaagcagaatggcagttgccagggattagggatagagggaggtggagagttattagttaatgggtatagagtttcagttttgaaagatgaagagttctggagatggatagtggtgatggttgcaaaacggtgtgaatgtacctaccaccactgagctgaacattttaaaatggttcatatgccaaattttatattctgtgtagtttaccacaattaaaattttttatggaaaacaaaaacaaatgttctggcttccagattcctatagaacaacaccagttacctaaatttgaatctctccacacatcctataaacaaacaaaactaaggagaacgaataaaaccatccatggctacaatataatttacagacagagaaaattataaaccccattttatataaaagcaggtatatacatccaaaaccagcagatccagttacagagccatgctctagaagagaagccaagatggcacagaaaggctaaaccaccaccagaaaaagagagtcccatcttgagtggagaaatactgacaatatgtccgagatctggtagatgaaagaactgagacagattttaaaagggggtgaaattgtttgagactggcaatggcaatgttgcaaaggcaagaggaaaggcaggaagaaagaggcgacttgaaggggaggtaccccttcagggcttgatggtgaagaaaaacgaagcaagcaatgagtaagagtcccaggctgggcgcagtcgctgactcctataaacccaacactacgggaggccgaggtgggcagatctcttgagctcaggaactcgagaccagcctgggcaacatggtgagacccccatctctacaaaaataaaataaaataaaatactaaatttagccaggcgaggtagtgcgcacctgtggtcccagctactcgggaggaggctgaggcaggaggatcgcttgagcccaggaggcagaggttgctgtgagcagagatggagccgctgcactccagcctgggagacagagacaggccgtgtctcgaaaagaaaaagaaaaagaaagttaagagtcccacagaaatgaaacagaatcacaaaatcagaagacatcagccagtgcgccactctaaaaaaagagggcactcttgaactaagaaagctggtaagccacccaacctcctgcctcatttgcagttgctgaaactggaaaataaaatattacaaaatgcacagaaaattgcagacatattatatagaaaaaatttaagtgaaaatctatattttctaaaaaaaaaaaactcaacatgataccagaaacctgaaacataatattccagccaaaattaaataaccttaaacaataatttggtaacatcaaaaaaaatgccatgaatcagaaaaataactcagaacagaaatggacaaagaacgaaataactaagaaaacagtttgttaaaaaaaaaaagcaggagaaatagaagaataaaaaaatcagaaaaaaaaactaaattataagatgttcgaagaggaagagcttttacttaaaatataataactggtattgaggaaaggtattaacacagccaataaaataaaaataaaatcaaaagaaagcaattcagccgggtgcagtggctcacgcctgtaatcccagcacttcgggaggccgaggcgggtggatcacaaggtcaggagttcgagaccagcttggccattatggtgaaaccctatctttactaaaaatacaaaaattagccaggtatggtggcatgtgcctgtagtcccagctactcaggaggctgaggcaggagaatcgcttgaaaaaaggagatggaagttgcagtgagcggagatcgcaccattgcactccatcctgggcaacagagtgagattccatctgaaaaaaaaaagccattcaaaggatcagacagaaagtggcgttggtgtagaggcaaagatccaacatacattgcagtccctgaagaagaataaaacaatggaaccgatgtaatcttcaaaactataataaaagaaacttgggtctacatatcgaaaggaaacctaggaaaaattatatggaatgatcaagtctgaggtatatcttagagcatccattagatttgaaagaaaaactcctgtgggcctcaggcaaaaaggacaagaagatacaaatatacaggtaactgttagaacaaacacgtgaacattactgaacactgaaaaaactttaaaagttaagagtttggttgtttttggattttaagcacttccttgctttctagcactacgaggtgctccgtgtccatttctatatttcctgcccactactaaaatcagccatttctccaagaaaccctggatccttttattatggaaagtgagctgaacttcagcagtaagagggctggagagcgcccgcgggtctcgaacaacccagagaggtggtttgatgacacgcgaagtaaccgctgagctaaagccagcccagaggttgctttcggattgtattttcttgactggtgagaaagacctacgtcacaaagagtgagtcaaaacaacggtgctttagcttgactcagcgacctggactgtccaatccgccgctatctccaggcaattgcagagtgtccatctggggacatacagcagtgacaagtactcagccttcctctaacccctggagagctcttccgcggttgtgcccccggtttattctctcctcagcagtcacctggtccacaactctccacacgcccccacctcctttgcctccagcttttgcgctcccaaaacaaccacgcagggtcactttgtgatcaaatcgacttttacaagtagagcttgggtcataagagtggagtctttacaaggtgtaaattgtatttcagaccttatcttagaacttcgctgctaaactagataaaccttacatcctctccccaggggaaacttcctgcggcgctttttttttttttttttttgacagaatacccctctgtcaccctgtcacccaggctgcagtgcaatggccccatctaggctcaacccatacgcccctcttagccttcccagtagctaggactacaggcagtccaccatgcccaactaattttttttttcctgagacggattctccacgccgttgcccaagctggattgcagtggcaacaactcggctcactgcagcctccgcctcccaggttcaagcgattctcatgcctcatcctcccaagtagttgggactacaggcatgcgccaccacacccagctaatttttatattttttagtagagaggaagtttcaccatgttggccaggctggtctcgaactcctgacctcaggtgatccgcttgcctcggcctcccaaagggctgagattacaggcttcagccaccatgcccagcctttcttgttttgttttgttttgtctttttgtagagacaggctcttgctatgttgccaaggttgacctggaactggcctcaacagatccttccaccttggccacccaaagcgctaggattacccgtgtgagcctccatgcctggcctaaaaattatttccatttttaatactacagtaacatctattatttttatgtgcactgtaaacagctaatctttcttccccaaattcctacttttctccaattaaccactgtttatatttcaatgtgtatccttccagtcctttccctcaatctgtatatttaactgtatacaaaacataaggtttttcttggcttgctgggaatcttggttgttggatattgtttacttaacagcatgtcttggagatccttccagtcactgcatataaacctaaatcacttgtattgtaacagctgcattatattcaagtataaatgtactagttttaagtttcactatcataaagctgcagtgatacacatcttggtacatatatgtacacatacacaagtatgttgttagaatatatgctggattaaagaatctgcacacatatttggagaaagttatgggagaaatgcaagaggccttgagggtgcctgaagccgtaggatcatctttagtaataaggatcatcttttgttccccaggtactctgaagggcaattccaccagaatgtacattccatgacatctgggactttgatgcattgccccagacgataataccagtacctacagcatgttcacctaagcactggtcaagtggatattcctcaaccagaatgcaaacatttccattggttttagaaagccctgaaacaagcttctctttgagatttctgagttatctgggagattgctgtgggctcttgaatttccattccatttcctttcctaagacaccaacttgagcacctccaaacacccccatgacttaggtccctttgagactcaaaccacttaccagtcccaaaagagtttaaagattctgaaattcagaattgcattttagaagtgaccagagatggccaggcgccgtggctcatgcctgtaatcccagcactttgagaggccaaggcgggcggatcacgaggtcaggagatcgagaatatcctggctaacacggtgaaaccccatctctactaaaaaaaaaaaaaaaaaaaaaaaaaaaaattagccggatgtggtggctggcgcctgtagccccagttactcgggagactgaggcaggagaatggcatgaacccgggaggcggagcttacagtgagccgagatcgcgcctgtgcactccagcctgggcacagagcaagactccgtctcaaacaaaaaaaaaaaaagaaaaaagaaaaaaaaaagaagtgaccagaggtaagctccactgtaccaaaaaaggaacgacatcctttgaagctaaattaaactagatggtttcctgaagaatgagactgggtgcggtggctcaggcatgtaatcccaggactttgggaggccgaggcaggcagatcatttgaggtcaggagttcaagaccagcctggccaacatggtgaaaccccatatgtactaaaaatacaaaaaaattaaccaggcatagtggtgagcgactgtaatcccagctactcaggaggctaaggcgggagaatcccttgaacccgggaggcggacgttgcagtgagctgagatacccccactgcactcccgcctgggtgaaagagcaagactctgtctcaaaaataataccagtaataataataaatcaataaaaatcgggtaaatggagctgggcagaatggtgcatgcctagagtccctgcaactcgggaggctgaggcagaaggatcactcgagcccaggagttcaaggctgttgcctgctataattatacttgtgaatggctactgtactgcagcctgggcaacatagcaagaccctcttctctaaataaaataaaataaataaaattaaaaaatcaggtgaatggttaattccaaaagtgaaggggttgtgaaaatcaaaagagagatacagggtttctggaatgttggcaacgttttcttatccttagtagtgattatatggattatatagtagtgattatatggattcattttataagtatttaaatttacgtatatacctcataaactttctgcatgtttatctcacagtgttaaaatgcttaattaattaactgtagaaaattgatacaatcatcataagcatacatgcatccaatatacaatcttgaactatatcaaataaacaggaaaaaatacataaatcaccaattgtagttggaaatgttttaacatgcatctctaagaactgtagatcacatagaactgaaaatagtatggatatgaatgagctgaaatgaaaaacatttttaaaaatacgtagaaccaaaataaacaggcactctttttgaatatacatataacacttacaacaatagaccatgtattaggccataaaggaagcatcaataaattccaaagatccaatcccattcagacaatgttctcctactacaatgcatcctgaaattaacatttgtaaaaacaattgctaaaataaaatcccacttacttggaaaataaataacatattactagatcagactcagcttataaaacacttagaagtgaatgaaacactacatgacagaatttgtgtactacaaataaagcagtatttaaaggcaaacttacagttttaaatacactaataattaagagagattaaaatcaaatgagctgccacaggagacacaacctcacacccttcaggatagctactatcaataacacacacatacacacacacacacacacacacactcagagagagagagagaataagtgttagtgaagatgtggagaaattgaagcatttctgcactattggtgggaatgtaaaatgatacagctgctatggaaaacagtatggcagtcacttaaatagctaaaaatagaattaccatataatccagcaattccacttctggtatatacccaaaggaattgaaagcagaaactcaaatagaaattcgtacacttatgttcatagcagcatcgttcataatagctaaaaggtcagaacaacccaaatgtctatcgatggatgatggctaaacaaaatattccgttttaataatattccattgtagtattcacatacaatagcgtattatttatcctttttaaaaaggaatgaaattatggtacatgatacaacatggatgaaccttaagaacattgtgctggccgggtgcagtggctcacgcctgtaatcccagcactttgggaggccgaggtgagtggatcacctgaggtcaggagttcgaaaccagcctggacaacatagccaaacccgtctctactaaaaatacaaatattagccgtgcgtggtggtgggcgtctgtaatcccagctactggggaggttgaggcaggagaatcgcttgaacccgggaggcggaggttacagtgagctgagatcgcaccattgcactccagcctgggagaaaaagccagactctgtctcaaaaaaaaaaaaaaattgtgctaagggaaataaaggagtcacaaaaagacagctactgtgtgattccacttttatgagatacctagagtagtcaaatttatagagacggaaagcagaatggcagttgccagggattagagatagagggaggtggagagttattagttaatgggtatagagtttcaattttgaaagataaagagttcctggagatggatagtggtgatggttgcataacagtgtgaatgtacctaccaccactgagctgaacattttaaaatggttcatatgccaaattttatattctgtgcattttaccacaattaaaattttttatggaaaacaaaaacaaacgttctggcttccagattcctatagaataacgccagttacctaaatttgaatctctccacacatcctataaacaaacaaaactaaggagaacgaataaaaccatccatggctacaatataatttacagacagagaaaattataaaccccattttatataaaagcaggtatatacatccaaaaccagcagatccagttacagagccatgctctagaagagaagccaagatggcacagaaaggctaaaccaccaccagaaaaagagtcccatcttgagtggagaaatactgacaatacgtccgagatctggtagatgaaagaactgagacagattttaaaagggggtgaaattgtttgagactggccatggcaatgttgcaaaggcaagaggaaaggcaggaggaaagaggcgacttgaagggaaggtaccccttcagggcttgatggtgaagaaaaaggaagcaagcaatgagtaagagtcccaggctgggtgcggtggctcactgctgtaaaccaacattatgggatgctgaggaggacggatatcttaaggtcaggaactcgagaccagcctgggcaacatggcaagatgcctgtctctacaaaaatattaaaattaaataaaataataaaattaaataaatacaaaatttagccaggcgaggtagcgcgcatctgtggtcccagctactcaggaggaagctgaggcaggaggattgcttgaggcagaggttccagtgagctgagacggcgccactgcactccagtctcggagagagagatagaccctgtctcaaaaagaaaaagaaaaagaaaagaaaattaagagtcccacagaaatgaaagagaattacaaaatcacaaggcatcagtcggtgctccactctaaaaaagggctatttcggggaaaaatgcattttgttctaccaacaaaagagggcactcttgaactaagaaagctggtaaggcacccaaacttctgcctcatttgcagttgctgaaactggaaaataaaatattacaaaatgcacmrraaawtksmrrmmwwwtwwwwwrraaaawtttwarkkraaawycayaywyttttttttttttttkwgasrsrgwstckckctstskcscmsrskskrgwgyrswkkyrcamwmtcksskcwcwsyrmrmkcyscsycycssgkkywcrcsmywytcyysykyywsmsyctctswgwrwmwskgrswmyasrsgcscscsmcmmcrcscmsmkmwwwtttttktrtwtttwkwrkagasasrgkskcrcmsygkkstckmkmtcyygmyswcsykmkysryccgccysssycksccwmmswrmkkgswkkrmwwrcrwgmgysascsascsmrgccaaaagtccgtattttttttaaactcaccatggaaccggaaaactgaaacacagtactccaacctaaattagataaccttaaacaatcatttggtaacatgaaaaaaatgccatgaatcagaaaaataactcagaagagaaatagacaaagaacaaaataactaagaaaacagtttgtaaaaaagcaggagaaatagaaggaaaaaaaatcagaaaaaaactaaattataagatgtccaaagggaagagcttttacttaagatataataactggtattgagaaaaggtattaacacagccaataaaaaaaaaaagatatctcttagaacatccattagatttgaaagaaaaactcctctgggcctcaggcaaaaaggatgagaagatacaagtatacaattaactgttacaacaaacacatgaacattactgaacattgaaaaatatttttaaagttaagagtttggttgttttaggttttcttttcttttttttcttttttttttttttttttttgtgatacggagtcttgctctgtcgcccaggctggagtgcagtggcgcgatctcggctcacagcaagctccacctcccgaatggctcacgccattctcctgcctcagcctcccgagtagctggggctgcaggcgcccgccaccacacccggctaatttttttgtatttttagtagagacggggtttcaccgggttagcgaggatggtcttgatttcctgacctcgtgatccgcccgcctcggcctcccaaagtgctgggattacaggcatgagccaccgcgcccggcctgtttttggttttcaagcacttccttactttctagcactgtgagatgcaccctgtccatctctgtatttcctgcccagtgctaaaatcagccatttctccatggttccccatggaaaaggagctgaacttcagcagtaaaagagctggaaagcacccgcgggtctcgaaccacccagagaggtggttacaatgtactcgaagtaaccgctgagctaaagccagcccagaggctatctccggattatattttcttgactggtgagaaagacctacgtcacaaagtgagtcaaaacaacagtgttttagcatgactcagcaaccaggactgtccaacacgccaccgcctccagacaattggagtgtacagccagggacacacagcagtgacaaggacacagccttcccctaaccctggagagctcttccgcagttgtgtacctggcttattttctccttctcagcagtcacctggtccacaagtctcgacacacccccacctccttcgccttcagccactgcgctcccaaaacaaccacgcagggtcactttgtgatcaaatcgacttttacaactagtgcttgggccaggggagtggcgtctttacaaggtgtaaattgtatttcagaccttatcttagaacttcgctgctaaactagataaaccttccaaccccggcccaggtgaaacttcctgttatgctttttaaattttttttgttagagacagactctccctctgtcacccagtctggagtgcaatggccccatctaggcttaacccatacgcccctcttagcctcgcgagtggctaggactacaggcataggccaccatgcctaactaatgttttttcttttcttttcatttatttatttattttatttatttatttttttgagatggagtctccactctgttgcccaagctggactgcagtggtaccacctcagctcactgcagcctccgcctcccgggttgaagtgattctcatgcctctccctcccaagtagctgagactacaggcacgcgccaccacacccatctaatttctgtattttttaatagaggcgaggtttcaccattttggacaggctggtctcgaactcctgacctcaagtgatccacttgacttggccttccaaatggctgggattacaggcttcagccatcgggcccagccttttttgttgttgttgtcggagacggagtcttcctatgtggccaaggttgacctggaactggcctcaagagatccttccacctcagccacccaaagtgctaggattacccgtgtgagcctccatgcctggcctaaaaattatttccatttttaataccacaggaacatctattctttttatgtacactgtaaacagctaatgtttcttccccaaattcctacttttctccaattaaccactgtttatatttcaatgtgtatccttccagtccttttcctcaatctgtatatgtaactgtacacagaacataaggtttttcttggcttgctgggaatcttggttgttggatattgtttacttaacagcatgtcttggagatccttccacgcactgcatataaacctaaatcacttgtattgtaacagctgcattatattcaagtataaatgtactagttttaagtttcactatcataaagctgcggtaatacacatcctggtacatatatgtacacatacacaaatatgttgttagaatatatgctggattaaagaatctgcacacatatttggagaaagttatgggagaaatacaagaggccttgagggtgcctgaagccacaggatcatctttaataataaggatcatcttttgttccccaggtactctgaagggcaattccaccagaatgtacattccatgacatctgggactttgatgcattgccccagacgataataccagtacctacagcatgttcacctaagcactggtcaagtggatattcctcaaccagaatgcaaacatttccattggttttagaaagggttttagaaacccctgaaagaagcctctctttgagatttctgagttatctgggattgctgtgggctcttgaatttccattccatttcctttcccaagacgccaacttgagcacctccaaacaccccatgacttaggtccctttgagactcaaaccacttaccagtcccaagagagtttaaagattctgaaattcagaattgcttttttgaagtgaccagaggtaaaatcccactgtaccaaaaagggaaagacatcctttgaagctaaattgaagctaaattgaactagatgttttcctgaagaatgagactgggcgcagtggctcacacctataatcccagcactttgggaggccaaggtgggcagatgatttgaggtcaggagttcaagaccagcctggccaacatggtgaaaccccatctgtactaaaaatacaaaaaaaattagccgggcctagtggcgggcaactgtaatcccagctactcaggaggctgaggcaggagaatcacctgaacccaggaggcggaggttgcagtgagctgagatacctccactgcactcctgcctgggtgaaagagcaagactctgtctcaaaaataataccagtaataataataaatcaataaaaatcaggtaaatggagttgggcagaatggtgcatgcctagagtcccagcaacttgagagtctgaggcagaaggatcacttgagcccaggagttcaaggctgttgcccgctatgattacacctgtgaatggctactgtactgcagcctgggcaacatagcaagaccctcttctctaaataaaataaaataaataaaataaaaatcaggtgaatggttaattccaaaagtgaaggggttgtgaaaatcaaaagagagatacagggtttctggaatgttggcaaagtttttttgttttgttttgtttgtttgtttgtttgtttgtttgtttgtttttgagactgaatttctctcttgttgcccaggctggagtgcaatggcgcgatctcggctcaccgcaacctctgcctcccgggttcaagcgattctcctgcctcagcctcccaagtgggattactggcatgcgccaccaccacagctaattttgtatttttactagagagagtgtttttccatgttggtcaggctggtcttgaactcctgacctcaggtgatccgcccgcctcagcctcccaaagtgcttggattacaggtgtgagccaccgcgcccggttggcaacgttttcttatccttagtggtgattatatggattatatagtagtgaatatatggattcattttataagtatttatttaaatctacatatatatcttataaactttctgcatgtatgttatgcctcacagttttaaaatgtttaattagtaaacagtagaaaattgatataatcatcataagcatacatgcatccacaatacaatctccaactatgtcaaataaataggaaaaaacatataaatcaccaattgtagttggaaatgttttaacatgcatctctaagaactgtagatcacatagacctgaaaagagtatggatatgaatgagctaaaaaacaattttaaaaatatgtagatctaaaataatcaggcattcttttttaatatacatgtaacacaacaatagaccatgcattaggccataaaggaagcatcaataaattccaaatatccaatcccattcagacaatgttctcctactacaatgcatcctggaattaacatttgtaaaaatgatagctaaaataaaatcccacttgtttggaaactaaatcacatattactagatcagactctgcttaaaaaatacttagaagtgaatgaaacactacatgacagaatttgtgtactacaactaagcagtacgtaaaggcaaacttggagttttaaatacactaatgattaagaaagattaaaatcaaataagctgccacgggagatacaacctcacactcttcaggatagctactatcaatgacacacacacacccagagaaagagagaggcagaataaatgttagtaaagatgtggagaaattgaagcccttctgaactattggtagaaatgtaaaatgatatagctgctatgggaaactgtatggcagttacttaaataactaaaaatagaattaccatatagtccagcgattccatttctggtatatatccaaaagaattgaaagcagaaactaggccgggcacgatggctcatgcctgtaattccagcattttgggaagctgaggtgggtggatcatgaggtcagaagttcgagaccagcctggccaacacggtaaaaccccgtctctactaaaaatacaaaaattagctgggcttggtgtcacacgcctgtaatcccagctactcaggaggctgaggcaggagaatcacttgaacctagaaggtggaggttgcagtgagcctagatcacaccaatgtactccagcctgggggagagagcaagactccgtttcaaaaaaaaaaaaaaagaaaacagaaactaaaacagatatttgtacacttatgttcttagcagcattgttcataatagccaaaatgtcaaaacaacccaaatgtccattgacggacaatggctaaacaaaatattccattttcataatattccactgtagtattcacatacaatagaatattatttatcctttctaaaaaagaacaaaattgtggtacatgatacaatatggatgaaccttaataacattgtgctggccgggcgtgatggctcacacctgtaatcccaacactttgggaggtcgaggtgagcagatcacctgaggtcaggagttcgagaccagcctggtcagcatggtgaaaccccatctctactaaaaatacaaaaattagccaggtgtggtggtgggtgcctgtaatcccagctacttgggaggctgaggcaggagaatcacttgaacctgggaggcggaggttgcagtgagccgagatcatgccactgcactccagcctgggtgacagaatgagactccctctaaaaaaaaaaaaaaaaaaaaaagaacattgtgctaagtgaaataaatgagtcacaaaaagacaaatactgtatgattccacttctatgagatacctagagtagtcaaatttatagagactgagggcagaatggcagttgccagggattagggatgaagggagatggagagttagtgggtatagagtttcagttttgaaagatgaagagttctggagatggatagtggtgacgattgcataatagtgtgaatgtacctaccaccactgaactgaacacttcaaaatggttcatatgggctggggatggtggctaacacctgtaatcccagctcttagggaggcagaggtgggtggatagtttgagcccaggagtttgggatctgcctgggcaatatagtgagaccccattctccataaaaaggaaaaaaaagaccaaaaaaaggtgtaaaatggttcatatgccaaattttatgttctgtgtattttaccacaattaaaaatttttatggaaaacaaaaacaaatgttctggctcccagattcctatagaataatgccagttacctaaatttgaatctcttcacacatcctataaacaaaaaaaaactaaggagaacaaataaaaccatctatggctacaacataatttacagacagagaaaattataaaccccattttatataaaagcagatatatacatccaaaaccagcagatccagttacagagccatgctctagaagagatgccaagatggcacagaaaggctaaaccaccaccagaaaaagagagtcccatcttgagtggagaaatgctgacagtatgtctgagatctggtagatgcaagaactgagacgtattttaaaagggggtgaaattgtttgagactggtaatggcaatgttgcaaaggcaggaggaaagaggtgacttgaaggggaggtaccccttcagggcttcacggtgaagagaaaggaagcaagcagtgaataacagtaccagtctaggtgcggtggcttactcctctaaacccaacattatgtgaggccgaggtgggcggatcttgatctcaggaatttgagaccagcctgggcaacatggcgagacccccatctctacaaaaataaaataaaataaaaataaaataaaatacaaagctgggtgaggtagtgcacagctgtggtcccagctactctggaggaggctgaggcaggaggatcgcttgatcccaggagggagaggttgcaaagctaagatggtgccactgcaccccagactgggagacagagacagaccctgtctcaaaaagaaaaagaaaattaagagtctcagagatataaaagaaaatcacaaaatcacaagatatcagcctgtgctccactctccaaaaaagggcttcctatttgggggaaaaatgcattttgttctaccaacaaaagagggcactccagccaggcgcagtggctcatgtctgtaatcccagcactttgggaggctgaggtgggtggatcacctgaggtcaagagttcgaaaccagcctggccaacatggtgaaaccccgcctctattaaaaatacagaattagccgggcatggtggcgcatgcctgtaatcccagctatttgggaagctgaggcaggagaatcgcttgaaccggggatgcggaggttgcattgagccgagatcgcgccattgcactccagcctgggcaacaagagagaaactctgtctcaaaaaaaaaaaaaaaaaaaaaaaacgaaaacaaaaataagagggcactcttcaagtaagaaagctggtaaggcacccaaactactgcctcatttgtaattgctgaaactggaaaataaaatatttcaaaatgcacagaaaattgcagacatggtatatagaaaaaggttaagtgaaaatcaatatttttttgaaaactaaccatgaaaccagaaaactgaaacacagtacttcaacctaaattagataaccttaagcaatcatttggtaacatgaaaaaaatgccatgaatcagaaaaataactcagaacagaaatggacaaagaacaaaataagcagtttgtaaaaaagcaggagatatggaagaaaaaaaatctctgaaaagaaaactaaatcataaggaaagcttttccaaagaggaaaaacttttacttaaaatataataactggtattgaggaaaggcattaaaacagccaataaaataaaaataaaatcaagaaagcaattcaaaggatcagagagaaagtggtatagaggcaaagatccaacatacattgcagtccctgaagaagaataaaataatggaaccgatgtaatcttcaaaactataataaaaaaaaattgggtctacatatcgaaaggaaacctaggaaaacttatatggaatgatcaagtctaaggtatatcttagaacatccattagatttgaaagaaaaaaatcctgtgggcctcagtaaaaaagggcgagaagatacaagtatacaggcaactgttagaacaaacacatgaacatactaaacattgaaaaaactttaaaagttgagtttggttgttcttggtttttaagcatttccttactttctagctctacgagatgctccacgtccatttctatatttcctgcccagtactaaaatcagccatttctccgaggagccctgattccttttaccatggaaagggagctgaacttcagcagtgaaaaggactggagagctcccgcgggtctcgaaccgcccagagaggtaaaaggactggagagcgcccgcgggtctcgaacaacccagacaggttgcttgtttcaattaaagaactgtcgaagtaaccgctgagctaaagccagcccggaggttgctttcggattatattttattgactggtgagaaagacctacgccacaaagagtgagtcaaaaagagagtgcttcagcatgactcagcgaccaggactgtccaacacgcccccgacctccagacaattgaggagttgtccatctggggacacacagcagtgacaaggacgtagcctttcctaatccctgaagagctcttccgcaggtgtgtccccggtttactgtctccttctcagcagtcacctggtccacaactctcgaaacgcccccacctccttcgcttccagactctgcgctcccaaaacaaccacacagggtcacttcgtgatcaaatcgacttttacaactagtgcttgggccaggggagtggagtctttacaaggtgtaaattgtatttcagaccttatcttagaacttcgctgctaaactagataaacattccaacccccgcccagtgaaacttcctgttactctttttaatttttttagaaacagaatctccctctgtcacccaggccgcagtgcactggctccatctaggctcaaccaatacgcccctcttagcctcgcgagtagctaggactacaggcacaggccactatgcccaactaattttttttttgagacggagtcgctctgttgcccaggctggagtgcagtggcacgatctcggctcactgcaacctccgcttcccgggttccagcgatttctggctaatttttgtatttttaatagagacagggtttccaccatgctggccaggctggtctcaaactcctgacctcaagtgacgcgcccgcctcggcctcccaaagtgctaggattacaggcgtgagcttttttttctggctttttttttcttttctttcctctttttttttgagacggagtcttgctctgtcgccaggctggagagcagcggcaggatctcggctcactgcaacctccgcctcccgggttcaagcgattttcctgcttcagcctcccgagtagctggtactacaggcgcacgccaccacgcccagctaatttttgtatgtttagtagagatggggtttcaccatgttggccaggatactctcggtctcttgacctcatgacccacctgcctcagtctcccaaagtattgggattacaggcgtgagccaccgcacctggccaaattttttttcctttttctttttcttttttgagacggagtctccactctgttgcccaggctggattgcagtggcactacctccgctcactgcagcctccacctcccgggttcaggcgattctcgtgtctcagcctcccaagtagctgggactacaggcatgcgccaccacacccagctactttttatattttttagtagagaagagctttcaccaagttggccaggctggtcgcgaactcctgacctcaagtgatccgctgccctcagcctctcaaagggcggggattacaggtgtgagccaccgagccgggccttttttattttttattttctgtagacaggatcttgctatgctgctcagttgacctgtaactgccctcaagagatccttccgccttggccacccaaagtgctaggattacccgtgtgagcctccatgcctggcctaaaaattatttccatttttaatactgcaggaacatctattccttttatgtatactgtaaacagctaacctttcttccctaaattcctacttttctccaattaaccactgtttatatttcaatgtgtatccttccagtccttttcctcaatctgtttatttaactgtacacaaaacgtaatttttcttggcttgctgggaatccagttgttggatattgtttacctaacagcatgtcttggagatccttctgatcactgcgtataaatctaattcacttgtattgtaacagctgcattatattcaagtataaatgtactagttttaagtttcactaagataaagctgcagtaatacacatcttggtacatatatgtacacatacacaagtatgttgttagaatatatgctggattaaagaatctgcacacatatttggagaaagttatgggggaaatgcaagaggccttgagggtgcctgaagccacaggatcatctttaataataaggatcatcttttgttccccaggtactctgaagggcaattccagcagaatgtacattccatgacatctgggactttgatgcgttgccccagaagataataccagtacctacagcatgttcacctaagcactggtcaagtggatattactcaaccagaatgcaaacatttctattggttttagtaagacctgaaagaggctgggcgcggtggctaacgcctgtaatcccagcagtttgggaggctgaggcgggcggatcatgaggtcagatgatcaagaccatcctggctaacatgtgaaaccccctctctactaaaaatacaataaaaaaaaaaaaatagccgggcgtggtggcaggcgcctgtaatcccagctactcgggaggctgaggcagcagaatggcatgaaccaggaaggtggagcttgcagtgagccgagatagcgccactgcacttcagcctgggcaacagagcgactgtctcaaaaaagacctgaaagcagcttctctttgagatttctgagttatctgggattgctgtgggctcttgaatttccattccatttacttttccaagatgccaccctgagcacctccagacactccatgatttaggtccctttgagactcaaaccacttaaccagtcccaagagtttaaagattcttaaattcagaattgctttttagatgcaaccagaggtaagatcccactgtaccaaaaagggaaagacattctttgaagctaaattgaactagatggtttcctgaagaatgaagccaggggtggtggctcatgcctgtaatcctagcacttggggaggccgaggagggctatcacttgaggtcaggagttcaagaccagctggccaacacggtgaaacgccatctcttctaaaaatacaaaaaaattagctggggatagtggcggccacctgtaatcccagctattcaggacgctgaggcaggagaatcacttgaacctgggaggtggaggttgcagtgagctgagatcgtgccaccgtactctaacctgagtgacagtgacactctcaaaaaaaaaaaaaaaaaaaaaaaaaaactgaaccatggaaggaactcacaaacctccagcctgccttgaaaggggtaacaaaatacctagtcaacaagaagactgtcacccaagggacctgaagtgcacataatcctgccaaggaaagcacgcaccaatctgcccccagttgcccagtacttactgtatctaaaactgagccaggccttcagcccataggtgaagatacattcagtgttcccagtggcaagattcagcatcagaaattagacaaagggcatgtcttacagtaagggaattttgtacaaaagtccaaagggaggtgtatggtgctttgtggttcagataatacagaaagttgaggagcttgatggggcagagaatgaaaaccagctatatggtggcagccttgttaacccaaacagattcatttacaggtccattttttcagggtatagaaccagcaagttacaggcttcatctgcttgaagttaatgtgactgtagttcttcgtgtatgtatggctattttttcttctgcatccccttgacttggcatagtacttgatccagtggatatcaaagttttgtgagtttctgttttgagtttgccagtctgtgccatctaattctcaaatcagaccaaggtagggaagacagctagcttcttcttagtggttttcaatgtgggtagggagggattttgcctttctcagaggcatagacatttttagttgtcacaattgtggaagagggtgctactggcatctagcaggtagagtccagggatgaagttaatcctaaatcaaaatcaaaataataaacatcctacaatgccagcattggtttctacaacaaatgataatctggcccaaaatctcaacagtgccaaaattaagtaatcctgtgtctagcagacagtaagaaaaacactaagggccaggtgcagtggctcacgcctgtaatcccagcactttgggaggccgaggcaggtggatcacctgaggtcaggagtttgagaccagcctagccaacatggtgaaaccccatctctactaaaaatacaatattagccacttgaagccaggaggcggaggttgcagtgagccaagattacgccactgcactccagactgggcgatagagcaagactgtctcaaaaaaaagaaaaaaaaaaaagaaaaaagaaaaacattatgttcaatcctgagctctgctgttccaaaaacaaaagatcaaaggagtctgaaatgataggaatcgttttggttcagacttctctggacatagatcccttatcagacgaaaacataactcatgctaaaaaaaaacctaggcaaaaataagatttaaaatggaagaataaaatactctatatggaaatcctcagcatgagaaggaaaaacaaatattcacagggaagattatggaatgttctcaccaaatgtaaaacaggcccagtcaatgccatttattatacatgtcaaacagcttctaagaccgaagggctcccataataaggttttggggattttttgttttgtttttcattttcttttttgcatcaaacaggttcttccaaaagcctgctcacaaggtagacaaaaacataaatcttcaggaaaatgaaacaagagaagctgaaacaatctacacctgaatgttaaaaaactcatcagacacaaaccacaccaaacactcatcccatttaatttcctgttacatgctctgaggaagccaagaacatcaggccccagggcagcaatgctctaggattccagctcggaccccctctatatgacagattcatgcacacacatccacacaccatagaaccaggcagaaatacacatgcatgcacaggtggctagagaaccatagggcaggatgggaaaaagggctgatcaaggatatgcaatcaactggaaactgggacctagagaatgcttctgttgcaggatgaacatgagttaaaattaaaacaaaggcagaacacaggataaaggtgggatgttcagacaagaggtgggatagatgaagagataaagatgcagggggagttttgggaaagcagcctcagaaggggaggtttttctttattgggaactcaggtgggcagggtcctgtgactccagtgatacactgaggcagaagcaatatgccacagcattacctctgcaatctgtgccctctcccaaagtagagggaaaccatgagcccccaccctctatccctccccattgacactcttaagaactttcccattacccaaaaagaaatgaccccctactacacacacacacacgcaaagttaggtccagcataggccaaagtcaggccaagcacagaaagcctcagtaactcttcttggtggaaccaaagccagagaagcccatcacagctgccatctcatcgtcctcctcaaatgtcaagtcctcctcagccctccttttcttctccttctgtttctctttcttgtacgctttggccttttcctcctggagggaaaaatcactcagaatcagtttagactcctcagccaaatgttgtttgtaacaacaactaacattctggggcatgcagtacatgccagaaattgctctgagtacttcatgtatattaagatctctaatatggggatattgaggcacaaagaggttatataacttgcccaagattcacagccagtaagtggaagaaacagaattttgacccagtcagcctgatttcatgggtctctttaggactaggtacatttagttaattcctcttgcagttaaaaaaaaaaaaaaattatgggggaggctatgcatgttgtgggggacagtgggtatatgggaaatctttataactccctctcaattttgttgcaaacctaaactcctctaaaaaaagtttagtcttttaaaaaaattaaatcaaagaatacagatgagacagtcctcaacttatgatgctgacaagatttttcaattttataatggtgaaaaactgacatgcatttgaaactgtacttcaagtatccatacaaccattgtttttcacattcagtacagtattcaataaattaatgagatgaatactttattatagaataggctttgtgttagataatttgggtcaattgtaggctaatgtgttctgagcacattaaggtaggctaggctaaactacagtaggttaggtgtattatgtatttttgacttatgatatttttaacttgatgataggtttatcagtaggtaaccccatcagaagttgagaaatatctgtatgaccaaaaaaaaaaaaaaatttttttaaaaattacaaaaaaaaaaataaggcccagagagtctaggagaaaaaagtagtttcagagccatttccttcagatcatgagaatcctaaacaaaggcaacaaatgtttccgctaatatacagaactcaggagatacaactctgggggtgggagtaggagtgggatgaggacagggtctcccatgattcataacataaaactcaaatctgggggagaggggaaggataggagacccttacctcttctctgagctccttcatcctttcctcaaaatcataatccttctgcttctcttccatcttcttcttgttgacctcaaaacgtttcttcacctgatccagggtggaacgttccacacgcatagacatgcccaggtttctctgatctgcatagggtcaacagtgaagaaggcaagttcattacaacatcctcagcccctcaaaaattattttcctgacttctctgacatctcataaaacacacagcaaaaataattatggctaaaagaaactcccttggccagctgggtccaggagcagcacatggtttgggtgctgttgaaagcctcatggcctccagaatgaggcctcttacctcacggcctccagaaatattacataatgaagtaaaagacggcctgtgctgaaacaactggagagttctaataggggcatcaaaaaagagcccagtagaaactacccttcttactccagccatcttttgatgagtaaaaagaagaaaaaaaaagctacccttccattccaccccacctccaaaacccaattccagccctagtcacaagctacctccaagccttacgtttctttccattaatgtgatccagaaagttgatggagtccttcaccacacagtcacagacattgcagtaatatctaacaggaagaaacagcacctgagtcaaatatggttttaaggatcttatcattttcaaccaagaaactcaaatttttaggtaaacttctttttagaagtgttaagccttcatttctataaagccttagctttcgagagagtatagcagtcatcttccaagacagccccaggatgagccccaccctcttggtattcctactctgtgtagtctcttcccaatttgtaccagagttggtctgtttggccaatagaatatgtcaaaagtagtatcttccaaaattaggttattttaaaaaccatgccttctgtctttgtttgggttacttgctctggggaagccagttgctttattgtgagcagtcttatagaaaggtctatggggtggccgggcatggtggctcacgcctgtaatcccagcactttgggaggccgaggcgggcggatcacctgaggtcgggagttcgagactagcctgaccaacacggagaaaccccgtctctactaaaaatacaaaaaaatcaggtggtgcatgcctgtaatcccagctacttgggaggctgaggcaggagaatcgcttgaacccaggaggcgaggctgtggtgagccgagatcataccattgcactccatcctgggcaagaagagtgaaactctgtctcagaaaaaaaaaaaaaaagaaaagaaaaaagaaaaagaaaaaagaaaggtctatggggcaaagaacttaggcttccaaaccacaggcatgtgagagagcttggaagcagatcttccagccccacttaagattcatatgaatgcagacctaccttgccaactccttgattgcagcttcatgaagaccctgagccagaaccacctaggtaagccactcccagattccttacccaaagaaactgtgagtggtgtagtttatgctgctaagctttaggttaatttgttaatttacataacaatagataactaatacagacaggaatggacaacagtgggtttactaagcagctcagagaagtgtcactcattgctatctgtgttgctctcctgccagaaaacctaactggacagagaagcagtggggggcaaaagggtgacaagctcttgtaggacccttcttcctataggttatagtcttggaagaaggtgtacaatcaggcatccataacaactacagcctttgcagctagtctggaacctcaaacccctcttcttcaccattaacaactcctaggctctattctagctccacctaatttctctcctagaaatctcctcagtagtcctttccttcatttcttcttctgacagatcaaataatcccttttaaaatattaatagtaaatcagaattgataacaagtacaatggcaataaaaaatttaaaaactatattgagtagtagctgtagtgctcatagtatgatttttgtttgttttggtttttttaattgagacagggtctcactgtgttacccaggctggtcttgaattcctgggctcaagcaatcctcctgccttggcctcccaaagtgctgggaatacaggcgtgagccactgtgcccagccaatgctaataacatgaagaaacccactgagtgaccattcctagagacactatcatgtcaacttgagaccttgggagacacagaaaaacaaatataaagatagaattacaggcaagaaggacgtaatcctggggccaaggaccttcctcaacacttcctaaaaccaaaataggtggcttattagatgcattcttggctgcagaggaaaaatgataagcaactcaccctcccatctcagattgaggggttgtcttggtaatgacaattgtcttcccaagcttggattccaagtccaccttgtagtccctatgccgtaaaagctctcgcttgacaggctgcactggttttcctgaaacataatggggaaggaagtcccttcaatattatagttcctcaaccagaaaggaaaaaaaatgcatgaaatccaaaattcaggtcttactcatttcaaaatcattcctgaaaggacacaacagacacttaaagtagcagctggggagaatctcaacacaggaaaaaatcataagcaatcctcaactctacagcttttctccactttaaagccagcaaatctaaaaacagtatgttttatattcattgattaactgaattgtgggggagaatttctgaagaattactagaagcaactttttcaaaacgggagcaaggacattcaagaatgctttcaggcagataccctaggcataacggaaaggaaccttctgagagctgggcaaatttataaaaggggaccaacatctaggaaatgcctgttacatgtcaagcactatttattttacatgttacataaaaaatgaaagagttagtgagtgcaaggtggcctggaggtaaagggaaagaagaatgtacacgtttgaaacagatgacaaaataaaacatttctttatgcaatctcttaaacaggagagaagcaccaactccctgatgtacaaggcacagagaaacagcactactaagctctagctgaaacaatcacagatcctgcaaagttccccggcttttctcagactatatgggagggtcttgattgggccaggaatgttctctcccttaagaaatttcaagggaaagaggggggtcactgatagcggtaatgcacagcagcaaaatactctacttaacttctctgtcactactaaggatgccgttatcttctctgtacttcaggaaagcattaaacgagccaagcaaagggtgggcaaggaagcagagtgaaatagagctgaagagcatctcaaaactacttacttcatcccacctcctcgctctcattttgtaaatgcagaaacctaggcccagggaagcagcactctgccagagcttacaccgcgtgggaaggcagcgcacttcaactcccacccgctctccatcatcgcatcgcctctgtgatacccttagcccttgatgtagttagcacccaccatctttcttttctctctcttccgtgagcctcttctcggcgagtttctcatattcatctttgtcccactttcggcgaaagtccaagttttttgtctgtggggaggaaaaagcgtcaagatccgtcgccgtgtctgggcccctagagaagcagggaaccgcgccctcgcggtccaggtgtctacaggacgttttgaaagcgaagcctctttggactgtacgagaagactgaggtagcctcaagaccccaacccgagaaacctccgcgattctactgaccctctgccaaggcctattactggggagttcttgaacctgaaccctgggatctcgaggagatatcgggaagccagtcgggtgcaggagtttgtctctattcaggtctgaaaaaccattccccaccccgcaaaacctcctcctcagacacaacacctaccccgctgcccgacgccatcttcacagcgaagtgaatggcgagctgaaaaacgccgtaaaaagcggcttggagccgtaaggcaagatagccctccaataagcttggagtcttgtgttctaaacgagctaaggactggagggtttctaaaacaggcttgttggccccgcctctgctccaaggagacagcgcaggcgcaagaggagtatgaagcaacacggaagtaagggcgcttgcaattgttttttgccttggatttcaaaacaagcattaaagggtcaagatttagttcaactattttacaaacaaggaaactgaggttcgcaaaacagtggtctctgatctagtctagcaactttgcgtccactgccaagaatttctaaaccttttttaaggccgaagcgccattagggggtctagatgcctctcattcacctgcatgcactagggatatgaccctaaactacactgaaacgtttgcaacagaggcacccttcccgacgcacatataaaaagcatgttttgcacttgggctcttttccttgaagcaatgctaccaccctttggttcacttatttttccatcatctggggaactttatagtagaacataatttaatcagcataattggatttggaaaggccagtcatcaacactctagagtgaagcactgtggcataccggctcactatatgttgatttttagcaacaaaactacctcttggccgggcacagtggctcatgcctgtaatcccagcactttgggaggctgaggtgggtggattatgaggtcaggagtttgagaccagcctggccaagatggtgaaaccctgtctctactaaaaatacaaaaattagctggctactcgggaggctgaagcaggagaatctcttgaacctgagaggcggaggttgcagtgagccgagatcacgccactgcactctagcctgggtgacagagcaagactccgtctaaaaacaaacaaacaaaaaaactacctcttgaggagacggggaaagagggagaaactgtggctgctcatcactgaatacagaagcatcatcccagggaggttacttctacctcacagaattctccaatgtacactcaagcattttctatggtctatgcaaacaaagcccttgataacaataacaaattacccaaactactacacttaatattttatttaacatgttatccaaccacttctaaaacagcctccatggcacggtatggaatagagcagtgattctggcacaggaaatggtctccaaaatctcaaaatatcagatctctaccttgtcaagtcatctattaagttcaatgttcaagattatcaagcatacagccccactcttctactgtaagcaatggatgggctagagagatgtcaaatcaacatgggtactgccatgcccttaggatagcatctgtcctcaaagctgaaagcagccattgcccctctttgctgtcttccaaaaactccccagacaggccaatggctgattgtggacaaattcaccagaatctggttccgtagctacagtagaaggctaagtatctggtttctgatctcaatggttcagaatcctgagcctgaggtgactctcccagagccttgctcacagcaacaatctcactacctcttgacaacgttccgtggcacttcaaatttgcctctgcagctagagcatgtctctttcacatccagccatctgcacccatgcagaatagctgctcacactagcccaggagtcctcagggtcttctacagttctgcacccaggaagaatggaggaggcagaaggtacttgtcacccttcctggctagttgttgtgaagtccatcactcaattccagaggaattcagttctagaggaaaccttttctacaaagagcagcagatgggaatcaggcaaggatcaagactcagacagtcgcttctgaatttcagccacaaaattttcccgtttaatggccacctgaaacataagagaatcctcatgtgataaactagaaagtgatactaactccttagccactgtttttccagatttgttttactctgcatcttctcccattacttatacaaccagaaaggagtagtgtgggttgacctgaagaatgtataccctcaagatgaaagggattcaaacacctgatctatgtctattatgttgattagtctcaaaatacccattcggatttcatttgtctttcttctggccacccagtcaatactcacaggcagcaatggtcatcttgagtgagtgtttgttcatctctaccactattaaccatgaagataatttctcagccagaagatgcatatttcttacagaatctgggaaaggcagaaacacttcgtcccttctatttctgctgccgccactcacctcctctctgctggccactgaacggatcttgatgaccccttctttcagttcttgctcaccaataatgaccaccagtggaatgcctgtgctctcacaatagtgcagctgggttaatagtttggggttgttcttgtatagcatctctgcctgaaaaggatcaagacagagtaagggacttagaagtgaacacagcaacaaacctcaggaacatggatatccaagaaagccagagataagtggctagtccgcctaccctaaaaagccaatctagtagccagtagtagctagcagactaaaaaggttttgagttccaccccagacataagatagatatagccctgggtcctaaattccacacatacccagatggctcagatatcagctccaccataccttgattccagaatcccaaagctctgcaataagcttcaaccgttcttggagaaagttcttctgtggtgtggccacaaacacttgagtctctgtagtccgcaccttctcacctttggtctaataagagagaagaaagtaaaactaataaaaacctcctttccaccagcaattccaaaaatcaagacaaaaagaatcatcagaaaaccactccaactacacctccagaaacaggagggtttttaggtctccagccccacctcacacctatctaggacctaccttcatcctctgctccacaatgtagaagattcgctcaaccccaatgctgagtcccacacatggcaccttgtggcccttggggtcaaacatgcccaccagcccatcatagcgcccaccagcagccacactgcccacattcaggggctcctccccagcctgagttggggtctgcagcagcactgcttcatagatcactcctgtatagtagtctaggccccgagccaggctgaggtcaaaggagatctgtggggacaagattacagtcagtcccaaactagactcgggaccctgagagccctagagctcagcaggaggtccatttgcaattcagcttaccttatcagcaattccaaataaagtcaggtattcaaatagcagctttaggtctcccaggccctccagggcctgcttgttctgggatagtctgggatcctgaaacatttgctctactagggataccccacctggagagaaataaagtctctgctgttcactcacatgtgtttcattcaaaattatccctaatgtgctctagctagtcttcctcattttctttaaaaaaaaaaaaaaaaaaaaaaagatcccagtctcacatgacaagaccctcctcctttgcctctagctttgccatctgaagacacaaagtcgttacaataagtaaaagagaaattaaattcaggacaggccctggagcttagcatatctacagaaaagagttgtttcagaggtagaatttgagcacatgtcaccttcagcctggttctatcacagctctgaaaaccctggttcttaccatgacactggacatagtccccaattcgatcagccacctcaggagccaggcctttcttcaccaccatctcatgtctcacatctttccaagccatctgcataaacacccaaacattagcccagccccaagatctttctttctcaaactgaaaaaggacaactcaacttccattcagtatatacatcacaagtagctaactgtatactcagcaaagtcagagacagcttaagaaatccagtcacaatccccactgtatagcatgactcagatcttccttcagagtatgcctccttaccttccaccccaaaatagcccacttccagccacaatctccttatttttcactagtggtatggatttgagggcagggcagaagctagatagggtctactgaagtatgtcttctttgttaccttgtctagtttatctatggaggagcagatggcacggaacttgctttcaggaacaccacagacagcaaacatcccatccacaatccgccggtcatttacctgagaactcaatgtcagtgacccaagtgcttgtcaatgcccttccactcaaaacaatggcagtacctactttcctgacacacaaaaaggatggaaatttcacaggaagagtacagacatataggaaatacaacagctttactaggaaagtcctacagttgcaggcttaagggttggagtcacccaagtttgggacttgcataaacagtattaggccaaatccagacttctcccacagttctcagccctggcctcaccttaatgagaaagtctcccaactgcaatccacttaggatttcacacatgatcttcaaacactctgcatcggggatcatagggtcaaactgaccagcaatgtcaaaatcctacagcaaagaaaaagatgggaaaaaacatccattatccagccagtttcaaggttgtggcccctagaactatcaaactgtgctgctcccatcaggtcacttacacactggcagaactccctataacggccttggactatggttgggctctctcgccgccacacctttccaacatgataacgtttcatcttcttcaccttattcatggccagataacgagcaaagggaacctcacataaatgggttaaggaagagggatactgcatccaaagattaggcccagtatacagacattagggaggactgggcctatatcaactggatctcatccactagggtaagaacaaggaccttcccttttttccactatccccaaggcctagcagtgcttggaattcaatatatattgaatagtgtcaaatgaaggaatctcacctagcaaaactaaaagttcagcagaaagcaaggcaagtagagatagaagtgacccaagaactaacttcaggtctttctgcccattcagatcgattccgaaccatctcaaaatagtcaagcttcagaacttggatttgcctaacaacttctaagctactggttctgaaagtgcagggaaaggactacatgcatcttaattacccacgatgcttgtttaaaatgcagactgtaggccagatgcagtggctcacacccgtaaccccagcactttaggaggccaagatgggaggatcacttgaaacgatgagtttacaaccagcctgggcaacaaagacacccatctccacaaaaaaaattttttttttgagacagagttttgctcttgtcacccaggctggagtgcaatggcgcaatctcggctcactgcaacctctgcctcctgggttcaagtgattctcctgcctcagcctccctagtagctgggattacaggcacctgccaccacagccagctaactttttacgtcaaaagagatctgtggagacaaggtgacagtcagtcccaaactagactcagaacctgagagccccagagctcagcaggagctgagtagagatggggtttcactatattggccaggctggtcttgaactcctgacctcaggtgatccacctgcctcagcctcccaaagggcttggattacaggcgtgagccacgtgtctggccaaaaaaaacaattttttaatacaaattattgagccccattccagctacagaattagctaagaatctctgggactgcagccaaatgtctgtgcttctgcaagctcccccaaaggattatgatacacactagagttaaatgacagggctccaggccaggcttccgtagcagaactgccttctgggagaaactagaagtataggcaatggacctctaagatcccaaagtcacgttctccacttttgtcagagaaagcccgctggatttggaaagagacaggtcaggctccagtactcaaaaggatacagtaaggtcatagcggagggacaacagctctccaccttgatccttcagatcatacatgagcccagagtcctctccatacttctcagtcagggtttcctataggggtcaaacagaatgagccacagttgaaagcatgactccaaaacacagatgagaagccctttgggacactgaacgccattgaagaagtgagtgaggttgcacgtactctttcttctccccttaccttcagctcaaatgctggggtgtccatcccctttgctccatgacgtttaaagcagctgataaccaaatcaagaattttctccctcacaaccatatgctgaggactaagatccctggtaccctggaaaccaaaagcagccatagtgaaaacaaaaacaaaaaataagtccatttcagacaaggagttaaactacacttattatgtaatctcaggtctggagctgaaatctactgagttcaaatgactctgagccgcacctagtatctcaagaatagtatatatttttaaaatttactgtaaagaacattaaaaggggtcagagagacatgcaaggcagaggtcagtcctccaaggcactctaatgggatagggtaggcaaaaagtattacctttggggtcttgataataaaatttggtttctcttgatgtgctttcagttgggatgttaacactgcctctgcaacctggcagaagaatgaatgtgagatgtggcttctctggacactggccagacctgtggcatctctgaccctgttgaccaccaacctgcaaagactcttcaccctgagcaacaggaagccaaagcaccatttcatctatcccaatctcagtcccaccccaaagaatctatgttgtatttacaattacacgtgtaatatatatgaggtcaggtcttcaccacacaagcttcctcactgtatatggattttttttttttttttgagacagagtctcggtctgttgcccaggctggagtacagtggcacaatcacggctcactgcaatctctgcctcctggttcaagcaattctcctgccttagcctcccgagtagctgggactacaggcgcgccaccaccacgcccagctaatttttgtatttttagtagagatggggtttcaccatgttggccaggctgctcttgaactcctgacctcgtgatccaaccgcttcagcctcccaaagtgctgggattacagacatgagccacagagctcagccgcatttttaatattctcaaatactttaagaatctgagaataatgaaggcactgaacaacccaccactaccaacaccaaccattcaggggtagggattatggtgatcttctccaggtcaccgttcctactgaaagagcaaaaataatttttttttttttttcagatagagtcttactctgtcgcccaggctggagtgcagtggcacgatctcagctcctgcaacctccgcctcccgggttcaagcaattctcctgtctctgcctcccgagtagctgggattacaggcacatgccaccacgcccggctaatttttgtatttttagtagatacggggtttcgccatataggtcaggctggtctcaaactcctgacctcaggtgatccaccacccttggcctcccaaagtgatgggattacaggcatgagccactgtgcccggacaaaaaaataataatttttaataaggtagcactggttatcaggtttagagagaggaaaactgtaacttgaagacaagggaaccagctcaaggacacagaacaagcctgtggaatgataagatatggatttcttgaatgaactaaaaaactcagactgataagatgctgtgattgaatatcaataaaagatctgtgccctattgttcacgatagcacaaagcatctgctaagagagcattagaatctttccgaagtaaggcaaaacttaatcagtgacattaccagcacgctgtatgcccttccaaaaatagaggatgtggtggttccatactatggcgattatctgccctaagagaagtccaagttcaagtacacaatcccttatctgcaattccaaaatccaaaactctctgacatctgaaaatgtttttctgagattcattttgaggtaaattctaagacgaactcagtctacttctgatctttagtcatctcatttactaggaatattcatatatttcgcttaaaaatgttactgtttgagtccaagagtttcaggaaaaagtgtggatatgaattaaaatactcccttactacatatccgtgtataagtcattcatttaatcttgcagcctccgtttcctcaactgcagaatggaaatcaaaactccaacctctcaagattgctccaaggattaaatgaccaggcatccaaatcgcttagttcagtgtcagtacatagtgggcactcgataaaaaccgattgtaacactactggaatacaggccgcgaggctatgcgttcagatctggagaccctgctgggacagaccagagataattctgtctcgctcacctggctttggcaacggaccgccccggtgcacgaagcgcagggcggtcgcaggagctggctgagcagcgaagcccaggccctcctgggaagaagtccgagcaggggcatcgcgcggcaggacgccggctttccgggacaggaacaaaaggcctgggaaggaggcgggtcagacaccaggaagggtggagggcactgcaaaggcggaacccgcgcaccagggaaaactcgggcgtttgcgcacctcactagtcacgaaggctgaggtgggatcctcccaagttcccttagtagccagcttcggcacttccgggaggagccggaaataatttttgtgctcggcggaggctctctaggcgtgcgacccagcgactcgatagccggaagtcatccttgctgaggctggggcaaccaccgcaggtcgagacagcaggcggctcaagtggacagccgggatggcagagcgtgcggcgctggaggagctggtgaaacttcagggagagcgcgtgcgaggcctcaagcagcagaaggccagcgccgagctggtgagatttaggcagcaggggagagggccaaggcaaagcctgggaggacgtaaagccagggtgttcgggacatagggtagagatgtgagggaagcgaccagtcttgtagggaggagagtgggctgcgtggggagacatccggggtgggtcccgagagaaacaaagctaggcctgagcagagagatgtgatgagggaggaatattgaatgaatggcgggggagggaggagagtgacagatggatagctcagcgccttctttccctccacagatcgaggaggaggtggcgaaactcctgaaactgaaggcacagctgggtcctgatgaaagcaaacagaaatttgtgctcaaaacccccaaggtaatatcattcctgtagggagccactgagaaagtctctaactctactcacggggcgcttatgtctgcctccctaaaccaggtcattgaggaggatctgaaatgctgcagaggagaggacagtcgctctgggcgctgggctggactggactctacctgagtcattctgggatggcaaagtgatggcagaaactaggccagctgggtgatcaggggagtcagcctgctgctgctactccttcgttcattcaataaatgtgtatttagcgctatgtctctagcactatacaaagcactgaatatataccatggtggacaatatagcctaccctcatggagcttacattctactgaaggagagagacttagaacaaataatcccacacagattttttttgttttttttttaaacggagtatcctctattgcacaggctggagtgcagtggcacatcttggctcactgcagccgctgcctcctgggttcaagcgattctcctgcttcagcctcctgagtagctgggactacaggtgcccaccaccatgcccagctaatttttgtatttttagtagagacggggtttcaccatattggccagaatggtcttgaacttctgacctcaagtgatctgcccgcctcagtctcccaaagtgctgggattacagacgtgtgccaccgcacccggccaccacatgtggttatgtaattacatattgtgaaaaatgatataaagaaattaaggttgctctgagaaaaataagggagaactggggagtctgagaaaggctaactgaggaagtgatatactaactgatctaatgaatgagtaggagatagccagaggacaagtgtgacaaagataggtccaggtagagtatggaaaccctaaagtgggaaagaactttggtagttttgaggaactagaggatgatctacatggctagaactaagttaaggagagtagagtggaatgaggttggagattctgagctcatcctccagttcagttccactttctgtaagttctataaacagaactgtttaccccttcatctaggtgctcttggcacttcatacatatttgttattacaccaactttaagtagttatttatgtcgtttatttaccctgagactgagactagatgcctaaataggtatagtcagccctccatatcccaaggtcccacattcacagattcaaccaactgtggatcaaaaccattcaggggaaaagaaacgattaagaaaaaaaatctggctgagtgtggtggcttacacctgtaatcccagcactttgggaggccacaaggggaggatcatttgagcccaggagcttgagaccagcctgagcaacatagtgagtccctatctctaaaaacaaacaaacaaataaaaacctttgaaatctaacaataaaaatttcaaataaaaaatatagtatagcaactatttacatagcctttacattgtctaaggcattataaacactctagagactatttaaagtatataggaggatgtgcatataattttatgtcaagggcttgagcatccatggatttttggtatccacatggggcccagaacaaatctcctgtggatactgagggatgattctatttaatacatgtatttgaaattgaattccaaaggagaggggagatggtctgttttccttgtgttaaggttaattctttgggatcctaaattcattgagctgtttctttctacatataactaatttttgaaggttaaagagacagtgtaaaatcccaaagtggtgatcatcaatgatttttcaaactattagatgaaaagcttactgtggaatttatgatggatcagtctgtcctcactagtgatcagttttaacatcactaaaagtaggacaactagacattatgttcctgctgatgtgatgcaagaagaagtacacagcaccacctgggaagtattcttgccaagtaaattgaacttgaatctaatcagatctttggactaactatcagtttacaggaaatactagagatggaggaacatgttagatggcacatcaagcatattgttcaccaaatctagaatgtgaaaatttttttttaggacaaatggcccaatttcctcagttaataaatgacctttttaaaataaaaaaaaaaagttggggagggaaggaaactattgtagattaaatagacatatcagctgattacaacgcatagacttcattctgaagctgattcaaataaatcaaccataaaaagatattattgaggcaactggggaaaactgaccatggcttagcattagataatattaaggagttgctgttacttttgttagttataataaagatagagtctttggggttttttaaatgtccgtatgagttagagattcatactgaagtatttatggatgaaatgatatgacgtctgggatttatttaaaaatatgtaagaaaaacatgtcagggcttaaatgaaataagaatagcagatgttaatggttgttgaagctgggtaatggataaatggtgacctgtaatactattctctatattgtgtctttgaaaatttccatactatagtgttaagattatgctagagagttaatatccattttagtattaacaatagaaaactcagtattgtggggacaaggctctttcaagggatcttcatggtcaaaactatttctataataattcttttgttttgttttgttttgttttgtttgagacggagtcttgctctgtcgcccaggctggagtgcagtggcgtgatctcagctcactgcaacctccgcctcccgggttcaagcgattgtcctgcctcagccttccgagtagctgggactacagggatgtgccaccgcacctagctaattttttgtatttttagtacagatggggtttcaccgtgttggctgcgctggtcttgaattcctggcctcaagtgatcctcccacctcggcctcctaaagtgctgggattacaggcgtgagccactgcgcctggcccttctataataattctaagacattatctgcctttttcgttgtgttaacatttgcactgaaggcacaaaagcgctggtgagtagaactgctggtgccttagcatacattaagacagtgacactaaactgtactaatagccagtgtgttcttcactgccatgcactcacagtaagtaaataaataaataaattaattaattaatttaaaaaattcagttttacttaactatgtcattgataaaatggtaaaactttgtttgttttggggtttctttggagacagaatctcactctgttgcccaggctggagttcagtgtcacgatcttggctcactgcagcctccacttcccgggttcaagcaattattgtgcctcagcctcctgagtatctgggattacaggcgggtaccaccacatgcagctaattttttgtatttttacagaaatacaaaaaacatacaagaaacctacaacatgtttcaccatgttgaccaggctggtttggaactcttgagctcaggcaatctgcccaccttggcctcccaaagtgctaggctgagccaccatgcctggccaaaaacttactgattttattgaatcttgacccttgaggaccctatttttaaatatttgctatgacaaaatgggaagtacacataaagcacttctgcacgccaaggtagggaaaatgcttatgccattgttcaagttgcaagctgatctagctacttttttcatagaacatcttgttttatttgaattaacaactgaaagataaattatggtttttcaaacttaaatatttggcagacatttttacaacaataaacgaagtgagcctcgtcacctcaaggaaaacatctgacagtacttgtaggcagtgaaaaaattcaagtattcaggtgacagttagaattttagaaaacttagtcagggcatggtggctcaagcctataatcccagcactttgggagaccaaggcgggcggatcacctgaggtcgggagtttgagaccaacctgaccaacatagagaaaccccatctctactaaaaattagctgggcgtggtggcgcatgcttgtaatgccagctactagggaggctaaggcacaagaatcgcttgaacctgggaagcagaggttgtggtgagccgagatcgcgtcattgcactccagcctaggcaacgagtgaaactacatctcaaaaaaaaaaaaaaaagaattttagaaaacttgcatcttccatcataagcttgacagcttcccaataattaaagagttttctactgggtgtggtggcttacgcctgtaatcccagcactttgagagaccaaggtgggcggatcacctgaggtcgggagtttgagaccagcctagccaacatggtgaaacgctgtctctactaaaaataaaaatttagccaggtatggtagctcacgtctgtaatcccagctccttgggaggctgaggcaggagaatcgtttgaacctgggaggtggaggttgcagtgagccgagaacacgccactgtactccagcctgggtgacagagtgagactccatctcaaaaacaaacaaacaaataaaaacaggccaggcaaggtggctcatgcctgtaatccaagcactttgggaagcagaggcaagtggatcatgaggtcaggagatcaagaccatcctggctaacatggtggaaccccgtctctactaaaaatacaaaaaatttgccgggcgtggtggcacgcgcctgtatgtagtcccagttactcaggaggctgaggcaggagaattatttgaacctgggaggtggaggttgcagtgagccgagatcacaccactgcacttcagcctgggtgacagagcgagactccatctcaaaaaaaaaaaaaaaagactttcttgatgagatctgaagtgatgtaaataaataaggcttcctgatattgtataatgaaatgtatcaacatttgaaagacctgttatgaaatcatgcacaggcaaaggatccattcattcaaagtacaaaatacagtagtggatttttttttgtaggaaaatatacgtaacataaaatttaccattttaatgattttttttttttttttgagacagagtctcactctgtcaccaggctggagtgcagtggcatgaccttggctcactgcagcctccacctcctgggttcaagcaattctcctgcctcagcctcccaggtagctgggactacaggtgtgtgccaccacgcccagctaatttttgtattttttagtagagatggggtttcaccatgttggccaggatagtctcgatctcttgaccccgtgatccacctgccttggcctcccaaagtgctgggattacaggtgtgagccaccacgcccagcccattttaatgatttttaagtgtacagttcagtaacatgaagtacattcatactcataaccatcaccattatccacctccagaattttttcatcatccccaattgaaactctgtacccattaaacaataactccccacttcaccctccctccagcccctggtaactgctatcctactttctactttctgtctctatggatttgactattctaggtactagataagtgagagactaattgttcttttttttttttttttaagttcattgatctagctttcaaattccacattgcaaccaatctttaagaaacaaccacttgttggattctgatgtagtaccaaagaaaaatatccacagttagctgaaaagtttgttaaaatactcttccttttacaactacatatctgtgtaaggttagattttcgttatatacttcaaccagcacgacatatcacgacagattgaatgcaaaaatcacatatgagaatcctgctgtcttctattcagtcagacattaaagatttgcaaagatgtaaatcagtgccactcttctcactaaattgttttggaaaacagttacctttttctaaaatattatttgcgttaacatataatagatatattatttgtgttaacatatgttatttgttaaatgaataaatattttaaaatttttgccgttctaattctaatacagtaaatattgataggtataatccactttggggtcttgaatacatagtaagagtgtaaagaggtcctgaaaccaaagactttggagtagggtataaaagcccagattggaagctctgacctggaaggacaacacagttctagtcctgactgccacgaacatgctgaatggccttaagaaatgacttaacttctcaacatcctgtacttcatctgtaaaatttatctgcctagcctatgtcatagagttgttaccagaaacaaattagagaacaaacagttgtaactaagatttaaaagaaaagttatattgggagagaaacgttgcttataaaatttggaattcaattagttgagccagtttgagttggttatattgcctataatcatgtaggtatttttttgttgttattatttttgtttgtttggttgggtttgtttttgtttttgtttttgttttgacagagtcttgctctgtctcccaggctggagtgcagtggcactatctcagctcactgcaagctccacctgccgggttcacgccattctcctgcctcagcctcccaagtagctgggactacaggcacctgccaccacgcccggctaatttttttgtatttttagtagagacggggtttcacagtgttcgccaggatggtcttgatctcctgacttcgtgatccgcccgcctcggcctccccaagtgctggcattacaggtgtgagccaccgcgcccggctggttggtttgttttgtttttgagacagagtctcgctctgtctctcagtctggagtgcagtggtgcaatcttggctcactgcaacctccgcctcccaggttcaagtgattctccctgccttgagcctcctgagtagctgggattacaggcacctgccaccaccatttgtttgttttattgagacagtctcactctgttgcccaggctggagtgcagtggcacaatctcggctcactgcaacctccacctcccaggttcaaggatcctcatgcatcagcctcccaagtagctgggactacaaggggcgtgtcgtcgcacccggctaatttctgtatttttagtagagacgaggtttcaccatgttggccaggctggtctcgaacccctgacctcaggcaatccatctgccttggcctcccgaagtgctgggattacaggcgtgagccactgtgcctggcctcaggtaggtgtttgttattaggccaggaaatgttctgttatccgagagagagtgtttagaaaaatggcttaaagaaaagagttctaagaattttagaaaatagacccaaacttaaaagggaatggagtttggaaggcagatagcaaatgggtgtgggaattaatagggaattatttgtacttgttttaaaactcagtggcctgtaggaaaatctgtttagagcaggatttgctttttcattattgaggtcatccttttatatttccaaaacatattgttcttggttttcaaacctcatttctggttctctggctgatttcaactccaagggcacaagagactatagtccccggcagatggcagttcgcgagaaggtgtttgacgtaatcatccgttgcttcaagcgccacggtgcagaagtcattgatacacctgtatttgaactaaaggtgaggaatgggcaagaagaaactacatggtagatgagtgggcatttgaataacaaagaagatgacaacaagagagtgagggtccaaagggcccactcctgttgtggacacagaccagtctttgctccaataagaagagggacaagaatggcttggagggagaggccctgtcttttattatcttggttgtggccagcagattccaaaagagagccattctttggaatggtaattgttctgggtcctctctacattgtattgcgtggcatctgtacttggaatgttttctagattcatgcaaaccatacgtacataaatatgcaaccactctcctattgatggactctgaagttgttagtagttctttgctattaaaaactagattgcaactgggcacatctgtagttcctgcttctcaggaggctgaagcagaaagatcactggatccgaggagttcaaggctgtagtgtgctatgatggtgcctgtgaatagccaccatactccagtctgggcaatgtagcaagcccctgtctctaaaacaaaccagccaacccagattgcattactacctgcttcaaacccagtgattcccactgcacttatagtacaacccaaactctttactcaggtttacagagccctaggtgatctggccactgcctctcctacctcatctcatgctatttttcctcttgcccactatgctactctggtcttcttcctactcttggaacatagtcagtgtgtttgtacctccacacctttgttcttgctcttcccctttcctgaactccctttccttagctctttgcatgatttatttcagattatactagagactgcagattttaattcctttttaaaaaaaaaaaatacaaatagagacagaggtcttgctatgttgcccaggctgcttgcgaacgaacccctggcctcaagtggtcctccttcctcagcctcccaaagtgctgacattacaggcatgagccaccacgtccagccagccagattttaatttcagagctcagctaaaatgccactcctcaagtaatcttctccaactaccttctttaaagtagctgttctctctcttatcacaatgagctagtttattgcctttaggctataaaactgtctgaaattatctgttgtttccttcatcaatgtctctttttattgatatttaattgtacatatttatgagactgtttttacctactgtattagtttgctagggctaccataacaaagtaccatagactaggtagtctaaacaacagaaatttattttctcacagttccagaggctggaagttgacataacatgttggcaggcctagttctttctgaaggccataaggaaggatctgttccaggcctctctccatggcttgtagatggccatcatctccctttgttttttttttaattgagacagagtctcgctctgttgcctgggctggagtgcagtggcaccatctcatctcactgcaactccacctcccaggttcaagcgattctcctgcctcagtctcctaagtagctgggattacaacacgtgtgccaccacacctggctaatttttctatttttagtagagacgaggtttcaccatgttgaccaggttggtggtcttgaattcctggcctccagtgattcgcccaccccagcctcccaaagtgctggaattacaggcatgagccaccgcgcccagcctccctttgtctttacatcgtcttccctctgtccctatctaaattttctcttcttacaacaacatattggatcagagcccaacttggagacctcatgttagcttaatcatctctttaaagaccctatcaccaaatgtagacatgttcagaggttactgggagttaggacttaaacaaatgaattggggagggtggggccagggggacacagttcagcccgtaacactagtgtgttactgtttctgatactgcatactgggaagtttcaggctttttaatctttgccaacctggtaagtgaaatatgctattaccgatgatagacatcacagggcaaggactgctgtaatgcccttaagacattccccagtttttacttttgacattattcgaatctcaggcatcaaaaaacatttatgtttgttggtctgataacctattcctagtagtttatcatcaagaaaaatactttttttttaaaaaaaaaagagctatatacctaaatattagatattgaaatgttatggggaatttttttttttttgagacagagtttcactctcgtcacccaggctggagtgcaatggtgcgatctctgctcactgcaccctctgcctcccgggttcaagcgattctcctgcctaagcctccgaatagctgggattagatgcctaccagctcccccagctaattttgtatttttagtagagacagggtttcaccatgttggccaggctggtcacgaactcctgacctcaggtgatccatccgccttggcctcccaaagtgctgggattacaggcgtgagccgctatgcctggcctaaaaaaatttttttttaaattagaataacctaaacacctaacagtataacatgagggaggaagtaagtacagagcttcttctcactggaatttatgcatcttttaaaaacacttcaggccgggcgctgtggctcgcacttgtaatcccagtactttgggaggctgaagcgggcagatcacgaggtcaagagatcgagactatcctggccaacatggtgaaaccctgtctctactaaaaatacaaaacttagccgggcatggtggcacccgcctgtagtcgcagccactctggaggctgaggcaggagaatctcttgaaccccggagtcagaggttgcagtgagccgagatcacgccactgcactccagcctggtgacagagcgagactccatttcaaaaaaaaaaaacaaacttcatgctgagaagtctgaagaaaaaaaagatttttaagaggaaaatgtgtaagaaaaatacttcagctctgttacaaaatcaaaatagaaaaaaacacaaaattggtgtttccttttaatgataactacatcagacacctaagaattgggataaagagcagagggaaatgtagacaagttggaatcagtcatgtttgttttcaaaacttccttttaaattgttatgtttattattatgaccacatttatttatgttttctccaggaaacactgatgggaaagtatggggaagactccaagcttatctatgacctgaaggaccagggcggggagctcctgtcccttcgctatgacctcactgtatctttctaaacttgggctcttgagactttggatggattggcactcacttggctcaggtttaagaatggtagagtaggtaggatcaaatatgaggcctttggcgattaggggaattatttctctaaaccaggagtggaactttggctaaacagagcatacacatccttagaaatcttctgaatcctgagtgagacctcagcttgatgtcagggcccagttccaactctacagtcatcccctggctccagaatacctctcccctgccctgtccagtgaacaaaattcttcttaatggactagcaacacatttcccttgtctccaagctacacagagaatcatctgcttagaaatcccatatgggggcctttttctggtcgcctttttctggtctgtggccaacctgcccagccccttgccatgctcaaaaaagtccagtcaacactacaaaagggaaaggtgccttaatcttttttgagccttcagctacctcatgtggtagcacagctgatgctttctgatgtttgtaagtgctattaatcttatgggtggcagttttacccacatagggaggggttagaccccagcttctgttggtgatgataatcaacttgcagacagtgataggaggggctttctccttaactctttgtcatcaggttccttttgctcggtatttggcaatgaataaactgaccaacattaaacgctaccacatagcaaaggtatatcggcgggataacccagccatgacccgtggccgataccgggaattctaccagtgtgtgagtgttgggaaaccgtggggcaggatgagttacttggggctctctcaagccagcagaatctattgagtactcacggtgtcctgagcaaattggatgacccagataatgctcttagggtttctatggtggtttttttgtttgttttttgtttttttgagacggagtctcgctctgttgcccaagctggagtgcagtggtgcagtcttggctcactgcaacctctgcctcctgggttcaaacgattcttctgcctcagccacctgagtagctgggattacaggcgcctgccactatgcccggctaattttttgtatttttagtagagacggggttttaccatgttggccaggctggtctcgaactcctggtctcatgatccgcctgcctcggcctcccaaagtgctgggattacaggcgtgagccaccgcacccagcctcttctatggtgttttcatgcagatttcacaaaatccctgtggtgggggaggagaataaagtctcttcattttacatatgagtaaacttgatacccagcccatgaagagatcatagggataagaaaggcaaagtcaggactagaactcttggtccagtgctctttattttaaaccacagtgataggatcacagcagagaataaggaaattagctttgatacatcaaatcatccagactgatgccagggcttctggatgaatagggaaaatggctaagcactaaagccatataatcaccccatccagtaggaggagttaagaagatgatgaagtagaaaatgaaggaatagcccagtagatggaaaggaaaccaaaactggtgagaagcccaaagatgccggggtttacctctgggctgatgatcagaaaatgaaagagaaattctatgcttgagtgcaaccaggccttcctagaggacagagctcccagagtccccccttcagaaaggtgaatccctgaagaccgctggctaaccctctccctgcaggattttgacattgctgggaactttgatcccatgatccctgatgcagagtgcctgaagatcatgtgcgagatcctgagttcacttcagataggcgacttcctggtcaaggtcagagctgacaaggctgggagggcaaagttgggcctggcctctcacaagagaagatccttgtgcagagggaccagtagcctaagtgaccatgactattgcaggtcatgtaagaaaagagattcccccctcactatgcattggttccttgcaggtaaacgatcgacgcattctagatgggatgtttgctatctgtggtgtttctgacagcaagttccgtaccatctgctcctcagtagacaagctggacaaggtaacaacccaagtacttgactttttttcccagatcccaccctgccttgggaaatggaaaacaagattgagagagagagaggtgcatgcctctatacccaccagaggaaggttagccccaggatgtaggctcatgggcagctactgctctaaaacggttccccgaggacagtacacacttgctctgtggtgcggaagctgcccaggggtccctgactggtgtctgtctgcctaggtgtcctgggaagaggtgaagaatgagatggtgggagagaagggccttgcacctgaggtggctgaccgcattggggactatgtccagcaacatggtgaggaacagaaccaagcctccccagcagccgtcccactgccctcagtcctaaagttgaaactgttctgtgttatgtatgtaggggagtgagtgtgtctatgcatatgtacacacacatgcatgggcgactagagtccaggcaagaaggtcaaccctccttaccttttttgtttccttgtcagcctcactcacaagtctgtctccccaggtggggtatccctggtggaacagctgctccaggatcctaaactatcccaaaacaagcaggccttggagggcctgggagacctgaagttgctctttgagtacctgaccctatttggcattgatgacaaagtgagtcaagttggggacgggatcccttctgagctctggggcttcaggtccctgatcttaatctggcactgaccattttcttatctccacagatctcctttgacctgagccttgctcgagggctggattactacactggggtgatctatgaggcagtgctgctacagaccccagcccaggcaggggaagagcccctgggtgtgggcagtgtggctgctggaggacgctatgatgggctagtgggcatgttcgaccccaaagggcgcaaggtgccatgtgtggggctcagcattggggtggagcggattttctccatcgtggaacagagactagaggtaggtcctaggaggtaggtagaagatagtctgagcaggtggtggcacctaagctatctgatctccaagggagcaagtggtgctgctttgggcagggagcatctcacagaaatggagaaaagattattgctctttttcacagatttctaccccattatatgtaagttttatggatctttaatccataatctttctgcactcaatcctctgctctgggtctctacttccttcagggctgtcacaaacctgggctggtgtatccaagacttagatcttcctcatgatacggaatacttaacattttactgccttgtgccaggcactgtgcttggtgcttttcatgcattatcaaaatataattgttactacagccctgtgagagtagctaattttattaattgcattttccagatgagaacactgaagcattatagatcaaataatttgcttaaggccatgaaacttgtaagtggtagggtcagaatttgaatccaggcagtctgactccaaagtcttgccactaaccacactgcaatactgtctctaaatgggaagcatgtgtctgaggccctgggatccctcagatggctaccgtgactctctagcacctagagtaacaccaaggaagcctcttgtagcctcaagccctcctttgttgctgctggtcttaagtggctggttgcatttcatcttctgggaaatgctctggcaacctccccacagtcctatgccttttctctagggtggaaaccacccatttcccagttgagatcatttttccagtaggcatcttacattctaagaactatgaaaatagttttcctgaaaaagacaagggaagcagcagcagcattctcctttccccacacccatatacacgcctgtgccctgtaactgaagtgtgagaggcacagtgtcataaatgggtagatagtaagtggggactaaaactgtcaagggtgatctaattggggtgggctcatagtagtacttctgtgtgaatgctttggtggacccttaaggtactacatggaccagcctgggcaacatgatgagaccctgtctctacagattaaaaaaaaaaattttttttttttttaaattagctgagtatggtggtgtgtgcctgtagtcaggaggctgaggtgggaggatcacttgagcttgggaggtcgaagctgcagtgatcacaccacggcacttcagcctggatgacagagaccctgtctcaaaaaaaaaaaaaaggtactacatggagataagcttgaagttactgtaaaaaagctacctttactcttgccctaagttatttattctgatacgtcctatgtacaagtcagtcagttcagtcctcatatctactaaaagctacctttatgcccaaggtgctagatgagaagacagggcccctgccctggtagagctgagttgggcctggtctcaaaatcccgactagagcctgctttgtttgctccttgaaggtgttagcccagctctcttttatctgccccttccccaggctttggaggagaagatacggaccacggagacacaggtgcttgtggcatctgcacagaagaagctgctagaggaaagactaaagcttgtctcagaactgtgggatgctgggatcaaggtatgggaggcaagccccagggtggcagcaaacttaggtgtgctggacacaaactgaataaaagctcacccataatggatcctgccattacttctcaaaagtagagctaagaacagagtgccagcttggacaccctctgtccctgaggacagcagaagccagccttcatcttctgctcttgtcccctgcaggctgagctgctgtacaagaagaacccaaagctactgaaccagttacagtactgtgaggaggcaggcatcccactggtggctatcatcggcgagcaggaactcaaggatggggtcatcaagctccgttcagtgacgagcagggaagaggtgagggaggtgggcaggaaggctaagggacagagaatgtatgccattttggcaggcccatgcccattcaagacctgagaaaaagcctggcattgatattagtacaactcataaaagccttgagggcttaacctgttactgtggtcttagtagggtgagatctccatccctgcatataccttatggtttgttggctcccccaagaggcacactctagcctgaggtgtttaattaggttcctgctcccagctgagacaagcctgatgcctagagggctagaggaaactaggcactcggggagcagtggaatggaagatgcttataccaccttcttctcccatcctggccaggtggatgtccgaagagaagaccttgtggaggaaatcaaaaggagaacaggccagcccctctgcatctgctgaactgaacaaactatcagaggaaaggaagtgggactggcactatttgaggttaagacaaactgcatatgtacttcaattgctttgcacttttccgtttcagcggaagacctgaagagtggtcagaacagagcctttgatttttattatggttattttattgattattactggcaaaaacggccaggtacaacacctttttcatacaaggcccaggaggcttagtccagtctgtgctcctgggctacaaggacccagcctgagatggtcccatctgcagggccccgcaccagttggagcagatgcctccccaccaccaattgccaaaggtccaataaaatgcctcaaccacggagtctgcgtgtgtcagtgatgcctagccccgccttccccagcagaccaatgtagggatggaaaagggagaaaaacagtaaacttgtgaccctgaggttcttgtctccagcgtccaccctgcggcttgggagctcctcctggggaggcagcccccgtacatacgcacccgcgactttgcagctttcacctgaaggtctgagcgaagcccgggcggcgcacgtgcagtggatacctccacccccctgggaggcggggtcgcgctcagagccaatgagagcttgcggggtggaggggtagggaagcttccagaggccggtggggaggaagttataaagagggtacgagggggccagctggagagccatgcagtccaagcgggattgtgaggtaagcggctggcgacttgggggccggcgagccccgccggagcgggggtcggctttagggaccccagtaccacaggagaggtgggggcgcgcttggcgatccgccattccaaccttcctttccctctcagctgtggtgtgagagggtgaatccagagaacaaggcggcgctggaggcgtgggtcagggagacaggcatccgcctggtgcaggtgaacgggcagaggaagtatggcgggccacccccaggtacggtagtcccagcccctccgcctgtccggctacaccagccccctttgggggaggggctgctccgagccttcactgtcagaaactgcgaactacccggatttataccccccagcaaaggaggaactgtggctccacgtccacccgccccgtcgagggagggggccaatctcaaggtgtacctactctgtgccagcccccttgttagcgcagtcacctaattatgccaaccacccagggtacgggtgtaaacccatttcacagacctttgttcacatcgcctcccacccccgcgcgctgggtccgtgggctcagaattcgaaagcgtcgcctgacggtggccttgcataccctcttcccacaggctgggtgggcagcccgccgccagctgggtcagaggtgttcatcgggcggctgcctcaggacgtgtacgagcaccagcttatcccgctgttccagcgcgtgggccgcctctacgagttccgcctgatgatgaccttcagcggcctgaaccgcggcttcgcctatgcccgctacagctcgaggcgcggcgcgcaggccgccatcgccacgctgcacaaccacccgctgcggccgtcctgcccgctgctcgtgtgccgcagcaccgagaagtgtgagctgagcgttgacggcctgccgccgaatctgacccgcagcgcgctgctgctcgcgctgcagccgctgggtcccggcttgcaggaggcgcggctgctgcccagccccggaccggcgcccgggcagatcgctctgctcaaattcagctcgcaccgggccgctgccatggccaaaaaggccctggtggaaggtaggctggggcgggggtgctggttggggccaaacgcgttctgcccagcactttatactgagcatagctgttaaagttacaagatcttagagtcaaacatgccagaatttgcaaccttttactatttgatctcagatttttaaaacttccaatggtgctaccaccaccgcttacctaaatttgtgacacttcccgagcattacctcctgacttaattctcaaccttcccccacccccacaccgcaaaataggcacaggaccctcaagctatgaggaaactgttagagaaattgatttgctcaagggaatccaactgagctttttactactatagaatctgtttcctcagactgttatgagaattaagtaacataatgggtgtacggtacttagcacactgactgacttacagcaagttttcccagtaaagattagccattatgatggttatgaggcagacaaagcctgcaattaaccagtacttctccaaggaaacttgtaaggtagcagtgtgttatactccctttgcaaataatggaggctgaaggcttcattgtcttttcttacccatggtcacactaccaggaaatgggaaggctacaaataacaggactgtgtagctccaaagggctcaccacctggaggcttgggcccagggtttagacctgcccttgtctttgcatttttcctacagggcagtcacacctctgtggagagcaggtggctgtggagtggctcaagccagacctgaagcagcgacttcgccagcagcttgtgggtcccttcttgcggtccccacagccagagggcagccagttggctttggcaagggacaagttagggttccaaggggctcgggctaccctgcagttgctgtgccaacgaatgaagctgggcagccctgtgttcctcaccaagtgtttgggcataggacctgctggctggcaccgcttctggtaccaggtggtgattcctgggcatccggtgcccttcagcggcctcatctgggttgtgctgaccctagatggccgggatgggcatgaggtggccaaggatgctgtgtctgtacggctgctgcaggcactcagtgagtctggggccaacctcctgtggtctgctggggctgaggcaggtaccatggttaaacagtgactccattctttctccacaggcaccctgaatgggcatgcagagcctgtgtcaggccccatcccagcaggcctgggtggccactttctgacccccaaaggtggggaggggcatgggcccaggcccatcagcctccctgctgggacagggacctatggcacctgggggcagcttaggtttgggttaagttgtggtgaggggccttgccctcccgctcccagcccagggtccaacctgacccagtgatcttccatggccgttccttgtcccacccccacccgatcataccttcccccctctgccacagcttagcatgaatcttctttattgtcctgatttgtcctctttgttggtttttatttgtggggaagggcagctgagccaaaggggtcagaaattctgccctttgcctccaccacatggcattctggttttggtttctgtatagttttgggtctttctatgctggttgtatttatattaaacccctggttagtatatacttgtgtctgtgctgtcttgccctagcttagagtttgtttacactggtagagtgaatagctgctacggggcaagtacttcctcacatcagtgctttgagtgcatcttcttgtgctgcactgtagggtattataaattcatatccaggccgggtgtgttggcttttgcctgtaatcccagcactttgggaggctgaggcgggtggatcacctgaggtcaggagttcgagaccagcctggccagcatggagaaaccccgtctctactgaaaatacaaaaattagcctggcatggtggcagacacctgtaatcccagctacttgggaggctgaggcaggagaattgcttgaacccgggaggcggaggttgcagtgagccaagatcacgccattgcactccagccctggcaacaagagcgaaaccctgtctcaaaaaaaaaaaaaaaaaaaaatttcatatccagccaggcacagtggctcatgcctgtaatcccagcattttgggaggccaaggcaggaggatcacttgagcccaggagttccaagaccagcttggtcaacatagtgaaacccctggtctctaccaaaaaaaaatcacaaaaattagtcaagcatggtggcagatgcctgttaagtctcagctaccaggcaggctgaggtggatcacttgagcccaggaagtcaaggatgcagtgagccatgatcaacccactgtactccagcctgggtgacagagtgagaccttgtctcaaaaaatataaatttttttggccaggtgtggtggctcgtgcctgtaatcccagcactttgggaagcagaggcaggtggatcatttgagtccaggagttgaagaccagcctgggcaaaacagacccgtttctaccaaaaaaaaaaaacaaaaattggcctggtgtggtagtgcacacctgtagtcccagctgctccagaggctaaggtggaaggacaatctgagcctggggacattgaggctgcagtgagccaagatcaagccagcgcactccagcctggacgatggcaaaaccctgtcttttcaaaaaataattcatatcctctctggggatgcagcccaataagcaagactcttgcctggtgaggacccgtctcaagattcaattcattccttcagtcactgtcatccccagtctcctccttttcttcctgagccatggagtcttctccctcttccctcagtcctgcgaagaagtcatcggtgctccaagtcttgctgctcagagcccgcagtggtcctcccttttttttgcgccgacggtagtcatccaccaccacagctcgcagctgggccatgtcccaaaacttgaggcgctggtcatggccactactggccaggaagcggccacagtgggagagggccagctcctccacaggctccccagtgtgctggcccacactgcccaccactcggttcggtaggatgttcacagccctgggcagggaaagaacagtgttgagtactggctagctgggtctgcccttcctgtgacctaagggctgtccaggcttccctcacctgatgactccatcagtggagccagtacacagcagactctcggtgactggaaccatgcagtcgatagattcagctctcagggcaaagcggtcacttgtggccccaaagccattccaattgaagaggtagatggtaccttcactggagccacaggctaccttcttcccccactgcagggaaatagagaaaacaatgtggaagctgcctcagactaagcccccagcacacacccctccatcccaccataaccagctgtactttcatgagagtgacagaggtcaggtccccagactgaggttctgagagcagctcaaaccgacgcctcttaatgttgaagatgccaaggcagccatccccgctgtagagagtagagcagtaggcttagacgcaaggtctatttgaggaagacatttcacacagggaggggaggggaggcaaggcagctttgaagttgtacctggctgtcagcagcagctttttggctggatccagagccatgtctgcgatgtactcttcatgttgcctcatatccattaaggggccctccttccgctggtcccagagacggataccacctgtgtcatccccagtggccagaacattctcatccaccagcagaagactgttgatgggggcactagagacacagatgtagaacttcttggagcatctctgtcccagtggggacctcctggtccttacccttcacctccatgcacatacacagaattggctgctctccttacccatgagccttggaaacacgtctttccagttggccctgctccacatctagaacatggatggctttgtccttggagacagtaatgagctctggggaaaaggtgcccaggtcatggtgctgctcactgctcccttccaccacattgctggttgtcttccccagtactcactctgcccatcttcagagaaggccacagctcggcaggccttgagatggtgacctgatgaccagagctccttggtttctccctcttggcaagagtaggaaaagctggggagagggcaaggagggtaaatgactccagacccagcctgggttgcattgagtgcagagaccaactagacagagcagccttcccacctacctaagagttcctgcttctacacctctaagcccaaaaagtttaccatctcatttctccattttcagtgagtttgaaatgttaggtcctgcttttttcaatatatgttagttcaaggtatatttgcgcaagatttctttgtgatcccacccaacccctctttatcatctttgaaagccccagcctggacaaagattgggtctggaccactgtggaggagatatttgttacatcaatgacaaaagaccagccccagaagttagaaatctaaaaatcagtaaggtagagcaggctcttgcacttcaggtctgcaggagctagagaaagccacaattaattacagtacattgagagtacgtgctgaaaaagaggcaagatcaaaatggaggtgggggagaggcaccagcctgtaaacaactttgaggtgagtactgtttacggaatacccccaagtgcctgcctcagagcagatcctcaaaaagggcagaatgaatacatgcttaattgccagtgagttccaggtaggcagaactgagcctgctcattttctctatcccagtgctgaacgtgaaaaagtagcttaataaacattcacaaattgaatgaatacttgggaagggagaagagagccctggaaagctaaggtggtgacatgtgggttggatcatacaagagtagaatttgcctggcagagagcaagggccagatactggagggagcagagataaggaatgaggagggttccttgtagcaggagagtagcatgactgaatctagaaagatgggctagggtgggcatgagaccacatgagccaagcagaagtttgaatttaatcctcggaaaaggaaccttttcacaatagtcatggctgagggtggggaaggggagaaccaagaattttcctccagaaccttttttaagacaagggaagcaacaaagttgtgtggaatgtgaagaaaggtggatgtctagggcaactcccaagtgcctggcaccataaatatggatagtagtagaagggaacctacatttgttgaagagctgcttaggtgctgtactgcaaacttgtcccctctgcaagggtaggtataattccccctttcaaagatgaaaatacagaagttaacacgctcaaggccattacagctaatgaggggttgaggtttaaattcattaagtaaatctgataagcataacatcttcaacttttccactgcctctaacctgtatcttttgttcaaaatcaaacatgtgttgagcatctaccctagactagaggttggagataaaacagagaacaaaaccgatgacagattacactccagaacagtgttttttcacattctagtcatataacggactagtaagctacgatcagcattttgtgtacatgtacacaataatagaataaaatcagcaattgtatcacagagcatcatatataatgtaaaaggtatttctctgtgaggcaaggtcaaagacgtttgaaaaacattagtgaaggagacagcattcaaataattacacaaatggacatatggttaccaaccattcattattaagggaaaggtaccatggcacctggtgccatggcagcatctaacaggtaaccaattttagtctggggagagaggaagagggaagagatcctggaaactcagagatagtaggtaaaagtgaggggaaaggagttttccggacagaatagcacatgcaaatgggctgaggtttcgagatttttttttgagatggagttttgctcttgttgcccaggctggagtgcaatggcacgatctcggctcactgccacctccacctcccaggttcaagcgattctcctgcctcagcctcccgagaagctgggattacaggtgcccgccaccacacccagctaatttttctatttttagtagagacaggatttcaccatgttggccaggctggtctccaactcctgacctcaggtgataccccaccttggtctcccaaagtgctgggattacaggcatgagccaccacgcccggcccaagacgtatttttaaaaggtatggatgaatgagcacagatggtcagggcgttgaaggcaggattgagaaatttgtactaaatcctaaaagcagaccattgaagggttttaatcaagggagtgtctcactctattgtccaagctggagtgcagtggcacgatcttggctcactgcaacctccaccgcccgaatccaagtgattcttctgcctcagcctcccgtgtagctgggattacaggcccgcgccaccacaccgggctaatttttgtatttttagtagagacggggtttcaccatgttgaacaggctggtctcgagctccaacctcaggtgacccgcccacctcggcctcccaaagtgcgggtattacaggcgtgagccaagatttgtggtttgaaaaatcacttaaaggggcctgctgagcctgtctcgggcacaatataataatccggtaggagtccgggcacggtggtttacgcctgtaatcccagcactctgggaggaaggcaggtggatcacgaggtcaggagttcaagaccagcctggccaagatggtgaaaccccgtctctactacaaatacaaaaaaaattagccgggcgtggtggcgggcgcttataatcccagctactcgggaggctgaggaagagaactgcttgaacccggaagggggaggttgcagtgtgcccagatcgcgccactgcactccagcctcggcgacagagcgagactccgtctcaaaaataaataggtaagtaaataaataataatcggtgggaaataacaaggccttaaagggctttttggcctactacggtatctgggctctgtcacgacattccagttctttcaacagattggtgtgatagaagagccgaatgttactgaataaattggacccaaagaatcttgcaaaatttgtctccctgcaactttctctcatctctcctgttcccaggtccacccccgggaagcttccagacccggcgccccggccctgccccgctctcacacgaacacgtccccgtccacgtcccctgcagccagtaggtcacgggccggatggaacgccagcccactagccggagcttccagcacgatgtcttccggagtgtcccggatccgggttggggcttccatggagtctgggtcctcctcgtcgctcccatcctcagcgggcctctcctcacaagtgcggtccatgctgagaaggactgcgagccgcgccgccgcagggtagtcagcctcggaaccacccacactgcgggaggagtagcctggcactccgcttccgcctcggggggcggggccggaagtgtctccgggacgttcttcctcttacaggagaggtgggtgggccgctgctggtgcgggtggagcggagcgaagagaccgcatctgggagatctgctacttccttgtcctgctgtgaccccgtttgggctaggtagacggtgcgaccgtcaattccctccctagtcacgtcacgtaaagttgagaactgcgtgtaaatctttcctctcctacttcatccagacaggcttaatgcccttgggataggagagagggacgctagtccttcgtggcttggtgaaacccaagatcaagtcaagcgacagcctgggctgtcaggaagccgcaaaatcccacgctgcgcgatgacatacgggagtctgggacagcaggcagctcaagcagctggtgtccacgcccctaacgtctttgtggccagtttgctgtgccagttcctacaatttgtctacagaaactcaatgggctggacaagcagtgctcagttaccaagaatttttttttcttttttgttttgctttgttttgagacagggtcttgcgctgtcgcgcaggctggagtgcagtggcacgatcaccgctcggctcaagcgatcctccgagtagctggaactacaggcacgcggcaccacgcctggctaatttttatttatttattgagacggagtctcgccctggctggagtgcaatggtgcgatctcggctcactgcaacctccgtctcccgggttcaagagattttcctgcctcagcctaccgagtagatgggactacaggcgcatgccaccacgcccagctaattttttgtatctttagtagaaacagggtttcaccatgttggccaggctggtctcaaactcctgacctcgtgatccgcccgccttggcctcccaaagtgctgggactacaggcgtgagccaccgcacctggccaatttttgtatattttgtagaaacgaggactcagtatgttgcccaggctggccttgaactcttgacgtgtcttcccacctcagcctcccaaagtgctaggattataggcatgagccacggcgcccagcccctgaatttctttttttaaatcaaggtcttgctctgtcacccaggctcagaatgcagtggtgtgatcatagctcactacagccttgaactcttcggttcgatcctcctgcatagctatagactcatgaactcctggcctcaagagactctcctgctttggcctcccaaagcactgagactgtgggcatgagccatcgagcctggcctcagaaactgaatttcaaacccacaatctccaggtcttgcttttagtgactctccagatgtcttcacctgtgccatgtctctgtgaccatttttaataattgggactgcctacctacatccatagaaccatggtgtcatttgtctgaaattagccattctaggtgctattgcagcaaggcccaatttcagcctcttacatgccatgcacaatactggcttcctcacaaaaacctgtcctaccaaggtgaatataatcaaagacaaggtaatggctaaggtgactttctagctttcttggatctggtgaggccacaaatcttgggctcagggtagacagtggcagcgtggcatccagccaggaagcagtagtgacacctaatgatgagcaccaggccaaagtgctggtaatgagcagaagggaagaaaagggaagggaatggtgtgattcaaaggtcaacagacctattctgggccttggcaaatgtttcagggtgatgaagggcaccaaacccttctggtctaggataggaattcctgtacctgcagggccacactatatcagctctaaacccaaagcacttccctaaggttacacctttagccaaggagacagtgatttgtactcaacattaataaagctcatagtacataaactcataaaaggttttggttcccacccataagtgattttcattagatgccttcatccagagcccagtccttcatagcctggagatcagattagcagcccatcaggctgacagcaatccccaggaaatctttccccagggactaggcctgaagatgggccggaatgagtctgacatttgagaccaatcatacttacattcctctatccacctcttgcccatcagtgaggatcattattctcttctctactgggcacactggctagagagcatccttactgtctaggaatctagaaccacagctcaggaaaggactgatgactttctgcatgtgattttacacaaccagtggaattagtgttcttggtgcttcaagggcactggaggggacatgctcaacaaagaaaatagcaagttaaccaattttaatggaaccaagtaattacacaataaaattttatattcatccacaaaaaaacatcttgcaacctttggaaattgtagaaagaaaaccgtggggagcatatccttgtggagcatctctggttgtaactagtgattagtattttggtcttttgacttcaaccctgcaatggaaggagaaatgggtcagtataagatcaatacactaagcaattcccaccagtcccacagaggaagaataatgccgctcacccatcagcttccatcttcttcctcttctcaatgatctgcaaaaacaacaggatagtctatcaccaagctgcccatctaagctcacctgaggcccaaggctgacctctcatttccatggctctccagccccttgcctgttcctgaatctgcaggctaatgtcttctcccagctgaaaccctcccacccaaggggccatcctacttactgcactaatcttcttccactggcgatcaagctctgctttgtcattggtttccttgaagcgcctggttttccgcccttcagacattttgataccatactggaatgcagccctgaaaaaagcagttgggaaagaatgcatcagagattgcatagcagtggcgaggttttcccagagtcctgtgggcaaagaacttagtggggaacatctcagccagaccacaccctctaaccttatat

SEQ ID NO: 572 - DNA, 3927 bp, Homo sapiens
gaattccggcccccgtgtctgggcgtccgcctcctggcctcctggctgaggggaagctgagtgggccacggcccatgtgtcgcactcgcctcggctcccacacagccgcctctgctccagcaaggatgtggctcttccacactctgctctgcatagccagcctggccctgctggccgctttcaatgtggatgtggcccggccctggctcacgcccaagggaggtgcccctttcgtgctcagctcccttctgcaccaagaccccagcaccaaccagacctggctcctggtcaccagccccagaaccaagaggacaccagggcccctccatcgatgttcccttgtccaggatgaaatcctttgccatcctgtagagcatgtccccatccccaaggggaggcaccggggagtgaccgttgtccggagccaccacggtgttttgatatgcattcaagtgctggtccggcggcctcacagcctcagctcagaactcacaggcacctgtagcctcctgggccctgacctccgtccccaggctcaggccaacttcttcgaccttgaaaatctcctggatccagatgcacgtgtggacactggagactgctacagcaacaaagaaggcggtggagaagacgatgtgaacacagccaggcagcgccgggctctggagaaggaggaggaggaagacaaggaggaggaggaagacgaggaggaggaggaagctggcaccgagattgccatcatcctggatggctcaggaagcattgatcccccagactttcagagagccaaagacttcatctccaacatgatgaggaacttctatgaaaagtgttttgagtgcaactttgccttggtgcagtatggaggagtgatccagactgagtttgaccttcgggacagccaggatgtgatggcctccctcgccagagtccagaacatcactcaagtggggagtgtcaccaagactgcctcagccatgcaacacgtcttagacagcatcttcacctcaagccacggctccaggagaaaggcatccaaggtcatggtggtgctcaccgatggtggcatattcgaggaccccctcaaccttacgacagtcatcaactcccccaaaatgcagggtgttgagcgctttgccattggggtgggagaagaatttaagagtgctaggactgcgagggaactgaacctgatcgcctcagacccggatgagacccatgctttcaaggtgaccaactacatggcgctggatgggctgctgagcaaactgcggtacaacatcatcagcatggaaggcacggttggagacgcccttcactaccagctggcacagattggcttcagtgctcagatcctggatgagcggcaggtgctgctcggcgccgtcggggcctttgactggtccggaggggcgttgctctacgacacacgcagccgccggggccgcttcctgaaccagacagcggcggcggcggcagacgcggaggctgcgcagtacagctacctgggttacgctgtggccgtgctgcacaagacctgcagcctctcctacgtcgcgggggctccacagtacaaacatcatggggccgtgtttgagctccagaaggagggcagagaggccagcttcctgccagtgctggagggagagcagatggggtcctattttggctctgagctgtgccctgtggacattgacatggatggaagcacggacttcttgctggtggctgctccattttaccacgttcatggagaagaaggcagagtctacgtgtaccgtctcagcgagcaggatggttctttctccttggcacgcatactgagtgggcaccccgggttcaccaatgcccgctttggctttgccatggcggctatgggggatctcagtcaggataagctcacagatgtggccatcggggcccccctggaaggttttggggcagatgatggtgccagcttcggcagtgtgtatatctacaatggacactgggacggcctctccgccagcccctcgcagcggatcagagcctccacggtggccccaggactccagtacttcggcatgtccatggctggtggctttgatattagtggcgacggccttgccgacatcaccgtgggcactctgggccaggcggttgtgttccgctcccggcctgtggttcgcctgaaggtctccatggccttcacccccagcgcactgcccatcggcttcaacggcgtcgtgaatgtccgtttatgttttgaaatcagctctgtaaccacagcctctgagtcaggcctccgtgaggcacttctcaacttcacgctggatgtggatgtggggaagcagaggagacggctgcagtgttcagacgtaagaagctgtctgggctgcctgagggagtggagcagcggatcccagctttgtgaggacctcctgctcatgcccacagagggagagctctgtgaggaggactgcttctccaatgccagtgtcaaagtcagctaccagctccagacccctgagggacagacggaccatccccagcccatcctggaccgctacactgagccctttgccatcttccagctgccctatgagaaggcctgcaagaataagctgttttgtgtcgcagaattacagttggccaccaccgtctctcagcaggagttggtggtgggtctcacaaaggagctgaccctgaacattaacctaactaactccggggaagattcctacatgacaagcatggccttgaattaccccagaaacctgcagttgaagaggatgcaaaagcctccctctccaaacattcagtgtgatgaccctcagccggttgcttctgtcctgatcatgaactgcaggattggtcaccccgtcctcaagaggtcatctgctcatgtttcagtcgtttggcagctagaggagaatgcctttccaaacaggacagcagacatcactgtgactgtcaccaattccaatgaaagacggtctttggccaacgagacccacacccttcaattcaggcatggcttcgttgcagttctgtccaaaccatccataatgtacgtgaacacaggccaggggctttctcaccacaaagaattcctcttccatgtacatggggagaacctctttggagcagaataccagttgcaaatttgcgtcccaaccaaattacgaggtctccaggttgcagcagtgaagaagctgacgaggactcaggcctccacggtgtgcacctggagtcaggagcgcgcttgtgcgtacagttcggttcagcatgtggaagaatggcattcagtgagctgtgtcatcgcttcagataaagaaaatgtcaccgtggctgcagagatctcctgggatcactctgaggagttactaaaagatgtaactgaactgcagatccttggtgaaatatctttcaacaaatctctatatgagggactgaatgcagagaaccacagaactaagatcactgtcgtcttcctgaaagatgagaagtaccattctttgcctatcatcattaaaggcagcgttggtggacttctggtgttgatcgtgattctggtcatcctgttcaagtgtggcttttttaaaagaaaatatcaacaactgaacttggagagcatcaggaaggcccagctgaaatcagagaatctgctcgaagaagagaattaggacctgctatccactgggagaggctatcagccagtcctgggacttggagacccagcatcctttgcattactttttccttcaggatgatctagagcagcatggagctgttggtagaatattagtttttaaccatacattgtcccaaaagtgtctgtgcattgtgcaaaaagtaaacttaggaaacatttggtattaaataaatttacacttttctttgcaaaaaaaaaaaaaaaaaaaaaaaaaaaaaaaaaaaaaaaaaaaa

SEQ ID NO: 573 - DNA, 4702 bp, Homo sapiens
ggccggggccgggcgggcgggtcgcgggggcaatgcgggcgcagggccgggggcgccttccccggcggctgctgctgctgctggcgctctgggtgcaggcggcgcggcccatgggctatttcgagctgcagctgagcgcgctgcggaacgtgaacggggagctgctgagcggcgcctgctgtgacggcgacggccggacaacgcgcgcggggggctgcggccacgacgagtgcgacacgtacgtgcgcgtgtgccttaaggagtaccaggccaaggtgacgcccacggggccctgcagctacggccacggcgccacgcccgtgctgggcggcaactccttctacctgccgccggcgggcgctgcgggggaccgagcgcgggcgcgggcccgggccggcggcgaccaggacccgggcctcgtcgtcatccccttccagttcgcctggccgcgctcctttaccctcatcgtggaggcctgggactgggacaacgataccaccccgaatgaggagctgctgatcgagcgagtgtcgcatgccggcatgatcaacccggaggaccgctggaagagcctgcacttcagcggccacgtggcgcacctggagctgcagatccgcgtgcgctgcgacgagaactactacagcgccacttgcaacaagttctgccggccccgcaatgactttttcggccactacacctgcgaccagtacggcaacaaggcctgcatggacggctggatgggcaaggagtgcaaggaagctgtgtgtaaacaagggtgtaatttgctccacgggggatgcaccgtgcctggggagtgcaggtgcagctacggctggcaagggaggttctgcgatgagtgtgtcccctaccccggctgcgtgcatggcagttgtgtggagccctggcagtgcaactgtgagaccaactggggcggcctgctctgtgacaaagacctgaactactgtggcagccaccacccctgcaccaacggaggcacgtgcatcaacgccgagcctgaccagtaccgctgcacctgccctgacggctactcgggcaggaactgtgagaaggctgagcacgcctgcacctccaacccgtgtgccaacgggggctcttgccatgaggtgccgtccggcttcgaatgccactgcccatcgggctggagcgggcccacctgtgcccttgacatcgatgagtgtgcttcgaacccgtgtgcggccggtggcacctgtgtggaccaggtggacggctttgagtgcatctgccccgagcagtgggtgggggccacctgccagctggacgccaatgagtgtgaagggaagccatgccttaacgctttttcttgcaaaaacctgattggcggctattactgtgattgcatcccgggctggaagggcatcaactgccatatcaacgtcaacgactgtcgcgggcagtgtcagcatgggggcacctgcaaggacctggtgaacgggtaccagtgtgtgtgcccacggggcttcggaggccggcattgcgagctggaacgagacaagtgtgccagcagcccctgccacagcggcggcctctgcgaggacctggccgacggcttccactgccactgcccccagggcttctccgggcctctctgtgaggtggatgtcgacctttgtgagccaagcccctgccggaacggcgctcgctgctataacctggagggtgactattactgcgcctgccctgatgactttggtggcaagaactgctccgtgccccgcgagccgtgccctggcggggcctgcagagtgatcgatggctgcgggtcagacgcggggcctgggatgcctggcacagcagcctccggcgtgtgtggcccccatggacgctgcgtcagccagccagggggcaacttttcctgcatctgtgacagtggctttactggcacctactgccatgagaacattgacgactgcctgggccagccctgccgcaatgggggcacatgcatcgatgaggtggacgccttccgctgcttctgccccagcggttgggagggcgagctctgcgacaccaatcccaacgactgccttcccgatccctgccacagccgcggccgctgctacgacctggtcaatgacttctactgtgcgtgcgacgacggctggaagggcaagacctgccactcacgcgagttccagtgcgatgcctacacctgcagcaacggtggcacctgctacgacagcggcgacaccttccgctgcgcctgcccccccggctggaagggcagcacctgcgccgtcgccaagaacagcagctgcctgcccaacccctgtgtgaatggtggcacctgcgtgggcagcggggcctccttctcctgcatctgccgggacggctgggagggtcgtacttgcactcacaataccaacgactgcaaccctctgccttgctacaatggtggcatctgtgttgacggcgtcaactggttccgctgcgagtgtgcacctggcttcgcggggcctgactgccgcatcaacatcgacgagtgccagtcctcgccctgtgcctacggggccacgtgtgtggatgagatcaacgggtatcgctgtagctgcccacccggccgagccggcccccggtgccaggaagtgatcgggttcgggagatcctgctggtcccggggcactccgttcccacacggaagctcctgggtggaagactgcaacagctgccgctgcctggatggccgccgtgactgcagcaaggtgtggtgcggatggaagccttgtctgctggccggccagcccgaggccctgagcgcccagtgcccactggggcaaaggtgcctggagaaggccccaggccagtgtctgcgaccaccctgtgaggcctggggggagtgcggcgcagaagagccaccgagcaccccctgcctgccacgctccggccacctggacaataactgtgcccgcctcaccttgcatttcaaccgtgaccacgtgccccagggcaccacggtgggcgccatttgctccgggatccgctccctgccagccacaagggctgtggcacgggaccgcctgctggtgttgctttgcgaccgggcgtcctcgggggccagtgctgtggaggtggccgtgtccttcagccctgccagggacctgcctgacagcagcctgatccagggcgcggcccacgccatcgtggccgccatcacccagcgggggaacagctcactgctcctggctgtcaccgaggtcaaggtggagacggttgttacgggcggctcttccacaggtctgctggtgcctgtgctgtgtggtgccttcagcgtgctgtggctggcgtgcgtggtcctgtgcgtgtggtggacacgcaagcgcaggaaagagcgggagaggagccggctgccgcgggaggagagcgccaacaaccagtgggccccgctcaaccccatccgcaaccccattgagcggccgggggggcacaaggacgtgctctaccagtgcaagaacttcacgccgccgccgcgcagggcggacgaggcgctgcccgggccggccggccacgcggccgtcagggaggatgaggaggacgaggatcttggccgcggtgaggaggactccctggaggcggagaagttcctctcacacaaattcaccaaagatcctggccgctcgccggggaggccggcccactgggcctcaggccccaaagtggacaaccgcgcggtcaggagcatcaatgaggcccgctacgtcggcaaggaatagggcggctgcagctgggccgggacccagggccctcggtgggagccatgccgtctgccggacccggaggccgaggccatgtgcatagtttctttattttgtgtaaaaaaaccaccaaaaacaaaaaccaaatgtttattttctacgtttctttaaccttgtataaattattcagtaactgtcaggctgaaaacaatggagtattctcggatagttgctatttttgtaaagtagccgtgcgtggcactcgctgtatgaaaggagagagcaaagggtgtctgcgtcgtcaccaaatcgtcgcgtttgttaccagaggttgtgcactgtttacagaatcttccttttattcctcactcgggtttctctgtgctccaggccaaagtgccggtgagacccatggctgtgttggtgtggcccatggctgttggtgggacccgtggctgatggtgtggcctgtggctgtcggtgggactcgtggctgtcaatgggacctgtggctgtcggtgggacctacggtggtcggtgggaccctggttattgatgtggccctggctgccggcacggcccgtggctgttgacgcacctgtggttgttagtggggcctgaggtcatcggcgtggcccaaggccggcaggtcaacctcgcgcttgctggccagtccaccctgcctgccgtctgtgcttcctcctgcccagaacgcccgctccagcgatctctccactgtgctttcagaagtgcccttcctgctgcgcagttctcccatcctgggacggcggcagtattgaagctcgtgacaagtgccttcacacagacccctcgcaactgtccacgcgtgccgtggcaccaggcgctgcccacctgccggccccggccgcccctcctcgtgaaagtgcatttttgtaaatgtgtacatattaaaggaagcactctgtataaaaaaaaaaaaccggaattcc

SEQ ID NO: 574 - DNA, 1990 bp, Homo sapiens
gcgaggcgggagtggaggtgcgcggagtcaggcagacagacagacacagccagccagccaggtcggcagtatagtccgaactgcaaatcttattttcttttcaccttctctctaactgcccagagctagcgcctgtggctcccgggctggtgtttcgggagtgtccagagagcctggtctccagccgcccccgggaggagagccctgctgcccaggcgctgttgacagcggcggaaagcagcggtacccacgcgcccgccgggggaagtcggcgagcggctgcagcagcaaagaactttcccggctgggaggaccggagacaagtggcagagtcccggagcgaacttttgcaagcctttcctgcgtcttaggcttctccacggcggtaaagaccagaaggcggcggagagccacgcaagagaagaaggacgtgcgctcagcttcgctcgcaccggttgttgaacttgggcgagcgcgagccgcggctgccgggcgccccctccccctagcagcggaggaggggacaagtcgtcggagtccgggcggccaagacccgccgccggccggccactgcagggtccgcactgatccgctccgcggggagagccgctgctctgggaagtgagttcgcctgcggactccgaggaaccgctgcgcccgaagagcgctcagtgagtgaccgcgacttttcaaagccgggtagcgcgcgcgagtcgacaagtaagagtgcgggaggcatcttaattaaccctgcgctccctggagcgagctggtgaggagggcgcagcggggacgacagccagcgggtgcgtgcgctcttagagaaactttccctgtcaaaggctccggggggcgcgggtgtcccccgcttgccagagccctgttgcggccccgaaacttgtgcgcgcagcccaaactaacctcacgtgaagtgacggactgttctatgactgcaaagatggaaacgaccttctatgacgatgccctcaacgcctcgttcctcccgtccgagagcggaccttatggctacagtaaccccaagatcctgaaacagagcatgaccctgaacctggccgacccagtggggagcctgaagccgcacctccgcgccaagaactcggacctcctcacctcgcccgacgtggggctgctcaagctggcgtcgcccgagctggagcgcctgataatccagtccagcaacgggcacatcaccaccacgccgacccccacccagttcctgtgccccaagaacgtgacagatgagcaggagggcttcgccgagggcttcgtgcgcgccctggccgaactgcacagccagaacacgctgcccagcgtcacgtcggcggcgcagccggtcaacggggcaggcatggtggctcccgcggtagcctcggtggcagggggcagcggcagcggcggcttcagcgccagcctgcacagcgagccgccggtctacgcaaacctcagcaacttcaacccaggcgcgctgagcagcggcggcggggcgccctcctacggcgcggccggcctggcctttcccgcgcaaccccagcagcagcagcagccgccgcaccacctgccccagcagatgcccgtgcagcacccgcggctgcaggccctgaaggaggagcctcagacagtgcccgagatgcccggcgagacaccgcccctgtcccccatcgacatggagtcccaggagcggatcaaggcggagaggaagcgcatgaggaaccgcatcgctgcctccaagtgccgaaaaaggaagctggagagaatcgcccggctggaggaaaaagtgaaaaccttgaaagctcagaactcggagctggcgtccacggccaacatgctcagggaacaggtggcacagcttaaacagaaagtcatgaaccacgttaacagtgggtgccaactcatgctaacgcagcagttgcaaacattttgaagagagaccgtcgggggctgaggggcaacgaaaaaaaaaaaaaaaaaa

SEQ ID NO: 575 - DNA, 1356 bp, Homo sapiens
atgcgtgagtgcatctccatccacgttggccaggctggtgtccagattggcaatgcctgctgggagctctactgcctggaacacggcatccagcccgatggccagatgccaagtgacaagaccattgggggaggagatgactccttcaacaccttcttcagtgagacgggcgctggcaagcacgtgccccgggctgtgtttgtagacttggaacccacagtcattgatgaagttcgcactggcacctaccgccagctcttccaccctgagcagctcatcacaggcaaggaagatgctgccaataactatgcccgagggcactacaccattggcaaggagatcattgaccttgtgttggaccgaattcgcaagctggctgaccagtgcaccggtcttcagggcttcttggttttccacagctttggtgggggaactggttctgggttcacctccctgctcatggaacgtctctcagttgattatggcaagaagtccaagctggagttctccatttacccagcaccccaggtttccacagctgtagttgagccctacaactccatcctcaccacccacaccaccctggagcactctgattgtgccttcatggtagacaatgaggccatctatgacatctgtcgtagaaacctcgatatcgagcgcccaacctacactaaccttaaccgccttattagccagattgtgtcctccatcactgcttccctgagatttgatggagccctgaatgttgacctgacagaattccagaccaacctggtgccctacccccgcatccacttccctctggccacatatgcccctgtcatctctgctgagaaagcctaccatgaacagctttctgtagcagagatcaccaatgcttgctttgagccagccaaccagatggtgaaatgtgaccctcgccatggtaaatacatggcttgctgcctgttgtaccgtggtgacgtggttcccaaagatgtcaatgctgccattgccaccatcaaaaccaagcgcagcatccagtttgtggattggtgccccactggcttcaaggttggcatcaactaccagcctcccactgtggtgcctggtggagacctggccaaggtacagagagctgtgtgcatgctgagcaacaccacagccattgctgaggcctgggctcgcctggaccacaagtttgacctgatgtatgccaagcgtgcctttgttcactggtacgtgggtgaggggatggaggaaggcgagttttcagaggcccgtgaagatatggctgcccttgagaaggattatgaggaggttggtgtggattctgttgaaggagagggtgaggaagaaggagaggaatactaa

SEQ ID NO: 576 - DNA, 1588 bp, Homo sapiens
taaagtgtttctttttttcttcttctttttagcttacagttgaacatgagtcttcttatgattagtgagaatgtaaaattggctcgtgaatatgcattgctgggaaactatgactctgcgatggtctattatcagggagttcttgaccaaatgaacaagtatctgtactcagtcaaagatacatacctccagcagaaatggcaacaggtttggcaggaaataaatgtggaagctaaacatgttaaagatatcatgaaaacactagagagctttaaactggacagcactcccttgaaagcggcacagcatgaccttccagcttctgagggagaagtctggtccatgcctgtacctgttgaacgaagaccctcaccaggacctagaaaacgccaatcttctcagtacagtgaccctaaatcacatggtaatcgtccaagtacaactgtcagagttcaccgttcatctgcacagaatgttcacaatgacagagggaaagctgttcgttgtcgtgaaaagaaagaacagaataaaggaagagaggaaaagaacaaatcacctgctgcagtaacagaaccagagacaaataaatttgatagtaccggatatgataaagacttagtagaagctttggaaagagatataatttcccagaatcccaatgttcgatgggatgatatcgctgatttagtagaagctaaaaagttgcttaaggaagccgtagtgttaccaatgtggatgcccgaattctttaagggcattaggagaccatggaaaggagtactgatggtcggcccacctggcacggggaagacgctccttgctaaagcagtagctacagaatgcaagacaacattcttcaatgtctcttcatcaactttgacttccaaatacagaggagaatctgagaagcttgttcgtcttctgtttgaaatggctcgattttattctccagccaccatatttattgatgagatagactccatctgtagtcgccgagggacttctgaagaacatgaagcaagcagaagggtgaaagcggagctgctggttcagatggatggtgttggaggtacttctgaaaatgatgacccttccaaaatggttatggttctggcagctactaattttccctgggatatagatgaggctttaagacgacgccttgagaaacgaatctatattcctttgccgtcagcaaaaggcagggaggagctattacgaataagtctacgtgagttggaattggctgatgatgttgaccttgcaagtatagcagaaaacatggaaggttattcaggtgcggacattaccaacgtgtgcagggatgcgtccttgatggcaatgagaaggcgcattgaaggtttgactccagaggaaatccgaaatctttccaaagaagaaatgcacatgcctacaactatggaggatttcgagatggctttaaaaaaggtttctaagtcagtgtctgctgcagacattgaaagatacgagaaatggatatttgagtttggatcatgctaactcgagaagccgaattccagcacactggcggccgttactagtggatcccgagctcggtaccaagctt

SEQ ID NO: 577 - DNA, 2666 bp, Homo sapiens
tcaaaatcttggtggaagatgagctcagctccccagtggtggtgttcagatttttccaggaattaccaggctcagatccggtgtttaaagccgtcccagtgcccaacatgacaccttcaggagtcggccgggagaggcactcgtgtgacgcgctgaatcgctggctgggagaacagctgaagcagctggtgcctgcaagcggcctcacagtcatggatctggaagctgagggcacgtgtttgcggttcagccctttgatgaccgcagcagttttaggaactcggggagaggatgtggatcagctcgtagcctgcatagaaagcaaactgccagtgctgtgctgtacgctccagttgcgtgaagagttcaagcaggaagtggaagcaacagcaggtctcctatatgttgatgaccctaactggtctggaataggggttgtcaggtatgaacatgctaatgatgataagagcagtttgaaatcagatcccgaaggggaaaacatccatgctggactcctgaagaagttaaatgaactggaatctgacctaacctttaaaataggccctgagtataagagcatgaagagctgcctttatgtcggcatggcgagcgacaacgtcgatgctgctgagctcgtggagaccattgcggccacagcccgggagatagaggagaactcgaggcttctggaaaacatgacagaagtggttcggaaaggcattcaggaagctcaagtggagctgcagaaggcaagtgaagaacggcttctggaagagggggtgttgcggcagatccctgtagtgggctccgtgctgaattggttttctccggtccaggctttacagaagggaagaacttttaacttgacagcaggctctctggagtccacagaacccatatatgtctacaaagcacaaggtgcaggagtcacgctgcctccaacgccctcgggcagtcgcaccaagcagaggcttccaggccagaagccttttaaaaggtccctgcgaggttcagatgctttgagtgagaccagctcagtcagtcacattgaagacttagaaaaggtggagcgcctatccagtgggccggagcagatcaccctcgaggccagcagcactgagggacacccaggggctcccagccctcagcacaccgaccagaccgaggccttccagaaaggggtcccacacccagaagatgaccactcacaggtagaaggaccggagagcttaagatgagactcattgtgtggtttgagactgtactgagtattgtttcagggaagatgaagttctattggaaatgtgaactgtgccacatactaatataaattactgttgtttgtgcttcactgggattttggcacaaatatgtgcctgaaaggtaggctttctaggaggggagtcagcttgcctaacttcatgtacatgtagaaccacatgtttgctgtcctactacgacttttccctaagttaccataaacacattttattcacaaaaaacacttcgaatttcaagtgtctaccagtagcacccttgctctttctaaacataagcctaagtatatgaggttgcccgtggcaactttttggtaaaacagcttttcattagcactctccaggttctctgcaacacttcacagaggcgagactggctgtatcctttgctgtcggtctttagtacgatcaagttgcaatatacagtgggactgctagacttgaaggagagcagtgattgtgggattgtaaataagagcatcagaagccctccccagctactgctcttcgtggagacttagtaaggactgtgtctacttgagctgtggcaaggctgctgtctgggactgtcctctgccacaaggccatttctcccattatataccgtttgtaaagagaaactgtaaagtctcctcctgaccatatatttttaaatactggcaaagcttttaaaattggcacacaagtacagactgtgctcatttctgtttagtatctgaaaacctgatagatgctacccttaagagcttgctcttccgtgtgctacgtagcacccacctggttaaaatctgaaaacaagtacccctttgacctgtctcccactgaagcttctactgccctggcagctcgcctgggcccaactcagaaacaggagccagcagagcactctctcacgctgatccagccgggcaccctgcttaagtcagtagaagctcgctggcactgcccgttcctacttttccgaagtactgcgtcactttgtcgtaagtaatggcccctgtgccttcttaatccagcagtcaagcttttgggagacctgaaaatgggaaaattcacactgggtttctggactgtagtattggaagccttagttatagtatattaagcctataattatactctgatttgatgggatttttgacatttacacttgtcaaaatgcagggggttttttttggtgcagatgattaaacagtcttccctatttggtgcaatgaagtatagcagataaaatgggggaggggtaaattatcaccttcaagaaaattacatgtttttatatatatttggaattgttaaattggttttgctgaaacatttcacccttgagatattatttgaatgttggtttcaataaaggttcttgaaattgttaaaaaaaaaaaaaaa

SEQ ID NO: 578 - DNA, 6629 bp, Homo sapiens
tggaatttgatccggaagaattttactacctattggaagcagcagaaggccatgccaaagaaggacagggtattaaaaccgacattcccaggtacatcattagccaactgggactcaataaggatcccttggaagaaatggctcatttgggaaactacgatagtgggacagcagaaacaccagaaacagatgaatcagtgagtagctctaatgcctccctgaaacttcgaaggaaacctcgggaaagtgattttgaaacgattaaattgattagcaatggagcctatggggcagtctactttgttcggcataaagaatcccggcagaggtttgccatgaagaagattaataaacagaacctcatccttcgaaaccagatccagcaggcctttgtggagcgggatatcctgacttttgcagaaaacccctttgttgtcagcatgtattgctcctttgaaacaaggcgccacttgtgcatggtcatggaatatgtggaagggggagactgtgctactttaatgaaaaacatgggtcctctccctgttgatatggccagaatgtactttgctgagacggtcttggccttggaatatttacataattatggaattgtacacagggatttgaaaccagacaacttgttggttacctccatggggcacataaagctgacagattttggattatctaaggtgggactaatgagcatgactaccaacctttacgagggtcatattgagaaggatgctagagagttcctggataaacaggtctgtggcacacctgaatacattgcaccagaagtgattctgaggcagggttatggaaagccggtggactggtgggccatggggattatcctctatgaatttctggttggatgcgtgccattctttggggatactccagaggagctatttggacaagtcatcagtgatgagatcaactggcctgagaaggatgaggcacccccacctgatgcccaggatctgattaccttactcctcaggcagaatcccctggagaggctgggaacaggtggtgcatatgaagtcaaacagcatcgattcttccgttctttagactggaacagtttgctgagacagaaggcagaatttattccccaactggaatctgaggatgacacaagttattttgatactcggtctgagaagtatcatcatatggaaacggaggaagaagatgacacaaatgatgaagactttaatgtggaaataaggcagttttcttcatgttcacacaggttttcaaaagttttcagcagtatagatcgaatcactcagaattcagcagaagagaaggaagactctgtggacaaaaccaaaagcaccaccttgccatccacagaaacactgagctggagttcagaatattctgaaatgcaacagctatcaacatccaactcttcagatactgaaagcaacagacataaactcagttctggcctacttcccaaactggctatttcaacagagggagagcaagatgaagctgcctcctgccctggagacccccatgaggagccaggaaagccagcccttcctcctgaagagtgtgcccaggaggagcctgaggtcaccaccccagccagcaccatcagcagctccaccctgtcagttggcagtttttcagagcacttggatcagataaatggacgaagcgagtgtgtggacagtacagataattcctcaaagccatccagtgaacccgcttctcacatggctcggcagcgattagaaagcacagaaaaaaagaaaatctcggggaaagtcacaaagtccctctctgccagtgctctttccctcatgatcccaggagatatgtttgctgtttcccctctgggaagtccaatgtctccccattccctgtcctcggacccttcttcttcacgagattcctctcccagccgagattcctcagcagcttctgccagtccacatcagccgattgtgatccacagttcggggaagaactacggctttaccatccgagccatccgggtgtatgtgggagacagtgacatctatacagtgcaccatatcgtctggaatgtagaagaaggaagtccggcatgccaggcaggactgaaggctggagatcttatcactcacatcaatggagaaccagtgcatggacttgtccacacagaagttatagaactcctactgaagagtgggaataaggtgtcaatcactactaccccatttgaaaacacatcaatcaaaactggaccagccaggagaaacagctataagagccggatggtgaggcggagcaagaaatccaagaagaaagaaagtctcgaaaggaggagatctcttttcaaaaagctagccaagcagccttctcctttactccacaccagccgaagtttctcctgcttgaacagatccctgtcatcgggtgagagcctcccaggttcccccactcatagcttgtctccccggtctccaacaccaagctaccgctccacccctgacttcccatctggtactaattcctcccagagcagctcccctagttctagtgcccccaattccccagcagggtccgggcacatccggcccagcactctccacggtcttgcacccaaactcggcgggcagcggtaccggtccggaaggcgaaagtccgccggcaacatcccactgtccccgctggcccggacgccctctccaaccccgcaacccacctccccgcagcggtcaccatcccctcttctgggacactcactgggcaattccaagatcgcgcaagcctttcccagcaagatgcactccccgcccaccatcgtcagacacatcgtgaggcccaagagtgcggagccccccaggtccccgctgctcaagcgcgtgcagtccgaggagaagctgtcgccctcttacggcagtgacaagaagcacctgtgctcccgcaagcacagcctggaggtgacccaagaggaggtgcagcgggagcagtcccagcgggaggcgccgctgcagagcctggatgagaacgtgtgcgacgtgccgccgctcagccgcgcccggccagtggagcaaggctgcctgaaacgcccagtctcccggaaggtgggccgccaggagtctgtggacgacctggaccgcgacaagctgaaggccaaggtggtggtgaagaaagcagacggcttcccagagaaacaggaatcccaccagaaatcccatggacccgggagtgatttggaaaactttgctctgtttaagctggaagagagagagaagaaagtctatccgaaggctgtggaaaggtcaagtacttttgaaaacaaagcgtctatgcaggaggcgccaccgctgggcagcctgctgaaggatgctcttcacaagcaggccagcgtgcgcgccagcgagggtgcgatgtcggatggcccggtgcctgcggagcaccgccagggtggcggggacttcagacgggcccccgctcctggcaccctccaggatggtctctgccactccctcgacaggggcatctctgggaagggggaaggcacggagaagtcctcccaggccaaggagcttctccgatgtgaaaagttagacagcaagctggccaacatcgattacctccgaaagaaaatgtcacttgaggacaaagaggacaacctctgccctgtgctgaagcccaagatgacagctggctcccacgaatgcctgccagggaacccagtccgacccacgggtgggcagcaggagcccccgccggcttctgagagccgagcttttgtcagcagcacccatgcagctcagatgagtgccgtctcttttgttcccctcaaggccttaacaggccgggtggacagtggaacggagaagcctggcttggttgctcctgagtcccctgttaggaagagcccctccgagtataagctggaaggtaggtctgtctcatgcctggagccgatcgagggcactctggacattgctctcctgtccggacctcaggcctccaagacagaactgccttccccagagtctgcacagagccccagcccaagtggtgacgtgagggcctctgtgccaccagttctccccagcagcagtgggaaaaagaacgataccaccagtgcaagagagctttctccttccagcttaaagatgaataaatcctacctgctggagccttggttcctgccccccagccgaggtctccagaattcaccagcagtttccctgcctgacccagagttcaagagggacaggaaaggtccccatcctactgccaggagccctggaacagtcatggaaagcaatccccaacagagagagggcagctcccctaaacaccaagaccacaccactgaccccaagcttctgacctgcctggggcagaacctccacagccctgacctggccaggccacgctgcccgctcccacctgaagcttccccctcaagggagaagccaggcctgagggaatcgtctgaaagaggccctcccacagccagaagcgagcgctctgctgcgagggctgacacatgcagagagccctccatggaactgtgctttccagaaactgcgaaaaccagtgacaactccaaaaatctcctctctgtgggaaggacccacccagatttctatacacagacccaggccatggagaaagcatgggcgccgggtgggaaaacgaaccacaaagatggcccaggtgaggcgaggcccccgcccagagacaactcctctctgcactcagctggaattccctgtgagaaggagctgggcaaggtgaggcgtggcgtggaacccaagcccgaagcgcttcttgccaggcggtctctgcagccacctggaattgagagtgagaagagtgaaaagctctccagtttcccatctttgcagaaagatggtgccaaggaacctgaaaggaaggagcagcctctacaaaggcatcccagcagcatccctccgccccctctgacggccaaagacctgtccagcccggctgccaggcagcattgcagttccccaagccacgcttctggcagagagccgggggccaagcccagcactgcagagcccagctcgagcccccaggaccctcccaagcctgttgctgcgcacagtgaaagcagcagccacaagccccggcctggccctgacccgggccctccaaagactaagcaccccgaccggtccctctcctctcagaaaccaagtgtcggggccacaaagggcaaagagcctgccactcagtccctcggtggctctagcagagaggggaagggccacagtaagagtgggccggatgtgtttcctgctaccccaggctcccagaacaaagccagcgatgggattggccagggagaaggtgggccctctgtcccactgcacactgacagggctcctctagacgccaagccacaacccaccagtggtgggcggcccctggaggtgctggagaagcctgtgcatttgccaaggccgggacacccagggcctagtgagccagcggaccagaaactgtccgctgttggtgaaaagcaaaccctgtctccaaagcaccccaaaccatccactgtgaaagattgccccaccctgtgcaaacagacagacaacagacagacagacaaaagcccgagtcagccggccgccaacaccgacagaagggcggaagggaagaaatgcactgaagcactttatgctccagcagagggcgacaagctcgaggccggcctttcctttgtgcatagcgagaaccggttgaaaggcgcggagcggccagccgcgggggtggggaagggcttccctgaggccagagggaaagggcccggtccccagaagccaccgacggaggcagacaagcccaatggcatgaaacggtccccctcagccactgggcagagttctttccgatccacggccctcccggaaaagtctctgagctgctcctccagcttccctgaaaccagggccggagttagagaggcctctgcagccagcagcgacacctcttctgccaaggccgccgggggcatgctggagcttccagcccccagcaacagggaccataggaaggctcagcctgccggggagggccgaacccacatgacaaagagtgactccctgccctccttccgggtctccaccctgcctctggagtcacaccaccccgacccaaacaccatgggcggggccagccaccgggacagggctctctcggtgactgccaccgtaggggaaaccaaagggaaggaccctgccccagcccagcctcccccagctaggaaacagaacgtgggcagagacgtgaccaagccatccccagccccaaacactgaccgccccatctctctttctaatgagaaggactttgtggtacggcagaggcgggggaaagagagtttgcgtagcagccctcacaaaaaggccttgtaacggggagggcccaggggcaggactgtggagacccgtcctgaacgggcgactgtgtcttgactacctttcaaaaccagcactgtgtgggaatgtccgccaggcagagctcggagcctcattgagacaggggagagagaaagacaaagaggggaccttcttccagatgccttcccagttgtaaccggtaaaactgttaccagatagtgtttgtac

SEQ ID NO: 579 - DNA, 5871 bp, Homo sapiens
gcaccacagaccagtctgtcctggtgttggatgttaaaagtggagccacaaagaagccatcttatgtgggacaggcttgggtgtgagaccagagctgtgggtagcagcatgttgggtcaggatgaggggcagaggaaacactttccacctcttggatatggattttatcctgccctgattcaggagatccccatctattaagtaaggggaaagatgattttgttgtcttttgtttcagattctaatgtaggaactggtgagaagaaggtgactgaagcctggatttctgaggatgaaaactcacataggacgacgtcagacagactcacggtgatggagctcccctctcccgagtctgaggaagtccacgagcccagattaggggagctcttgggaaatccagaaggtcagagcctggggagttccccctctcaggacaggggctgcaagcaggtgacagtgacccattggaagatccagacaggagagacagctcaagtgtgcaccaagtcaggaagaaaccatattctgaactcagaccttcttctgcttcagagagagctcatagagggggaagccaatccttgcgatatctgtggcaaaaccttcacgtttaattcggacctagttaggcatcggatttcgcatgctggggagaaaccttacacgtgcgatcagtgtgggaaaggctttggccagagctcacaccttatggagcatcagagaattcacactggagagagactctacgtctgtaatgtgtgtgggaaagacttcattcactattcaggtctcattgagcatcagcgcgttcattcaggagaaaagcccttcaaatgtgcgcagtgtgggaaggcgttttgtcacagttcagacctgattaggcaccagagagttcacaccagagagagaccttttgaatgcaaagagtgtgggaaaggcttcagtcagagctccttacttattcgccatcagaggattcacacgggagaaaggccctatgagtgcaatgaatgtgggaaatccttcataaggagctcgagcctcattcgccattatcagatccacacagaagtgaaacagtatgaatgcaaagaatgtgggaaggcattccgtcatcgctcagaccttattgaacaccagagaattcacaccggagagagaccctttgaatgcaatgagtgtgggaaagcctttattcggagttcaaagctcattcagcatcagaggatccatactggggagaggccttacgtatgcaatgagtgtgggaagcgcttcagccagacgtcaaacttcacccagcatcagagaattcacactggagagaaactctatgaatgtaacgagtgtgggaaagctttctttctgagttcataccttattcgacaccagaaaatccacactggagagagagtgtatgaatgtaaggaatgtgggaaagcgtttctccagaaagcccatctcactgagcaccagaagatccactctggggacaggcccttcgaatgtaaagactgtgggaaagccttcatccagagctccaagctgcttctgcaccagattattcacactggagaaaagccctatgtgtgcagttattgtgggaaaggctttattcagaggtcaaacttccttcaacaccagaaaattcatactgaagagaagctctatgaatgtagtcagtatgggagagattttaactcaactacaaacgttaaaaataatcaaagggttcaccaagagggactctccttgagtaaggcccccatacatttgggtgagaggtctgtagataagggggaacacacaggtaacttataaaataattactttcccgcccagtgagtgatgtttggaaatgcgtggaattaggattcatgtggtttctaagatttggacatgtcagaattttgtgagtcatggatggggctgcttttgcagtgggtgccacctgccactgtgcagccctactcggctcagcccttctcctcagctgtgagcactgtcctcaggagagtcacagggcttgacacctgactctgagctggaacagtaggggcagggagaagacaggtctcaagaaaaggtttttaagaagtttcatccccagttaagcagagtccatccttgacttaaatcccttattacagcacaactgtgtatctaatcttacgatttaggagaatgttacctaggacattttgatgtgttaagttgaagaaaggtaactcgtgtatgaaccccgagccatttccctgttgtcctgaggaggaactccaggcctcccatcgtgtgccctaaggcctcctgcgtcctggagccctgcctcccactgcctgacttcctgccacacggttaatgctgcagcaacaccgactgcttcatcttccctgtgctccacgtggcttcctacctctctcgcctttgttcttgttgaagggtctcttctcagctaattaactctgaatcatggttcaagacaagcctcaggcatcatgtcaatgggtgtttccctcaagcttagttggcagcactctccacacttctgtggctcagtgattactgctattactatatttacttgcatatgtcagaatgatgtgatagactatctctgtcactatgctgttgggttcctgaggacagtgatcatatctgattgatttccatgtgtccactgtctagcacagggcaataaaaaatacacccctaaatctatgtgtaattggcatctctcttgctttgtcctttctatactgccattctaaaaattttcagctgttggctgtttttttttgttgtttgttcattttgtatcagtataatctacgattctgttagaagtatcttctcagccctgctactgtctgctgctcctacttagaagttgcaggcaatatcctgtgcacatccacgccctcctgtgtgccaccttacagctcatgcagaactgtctacttgatctggagggcattgacacctggctcagctggaacagtggggacaggaggaggcaggtctcaagagaaggtctttacttacttgtctgtatctttctgtctcactcgaaaggcacagtctcaatgcgctacgtaactcttctgttgtagcagttctgaggttgaactgagctcttgtcattttccatgctctctggctcattgtgtcatttcaaaatgtattgatatctataaggaatagtcctcaatgttgggaaaacagatgagcaacccactaccctgaagtcatccaccgtgtagtggggaagacggagatcacagtagggtgagttaagtatgtgccctcaggtgtgaaggagcacaggtgagggggtgcctgctgtggcacagagctgggaaggccttacagaagaggtgacatttcagctgggccagagatcagtagagagcagctgaagaagaaaatagggtccaggagaggaatctgcagaaacatggagccatgacagatggctttttggctaggactgttcgaaagcaggcgaggtaaatggacagtggacagccgcctcgccaaactgttagtctttacctctgaatttcatctggacatgaaccccaaagtccagttttgtaacgatataatttttttctcatgaggccatattttgagttcttaaatactaccaaccctgaacgtctcaggacaaataattcaaaaaagagatctacattttctggaaaatcagcattactagagatgtttcaaatgtagattttaccagaccattttaatcaactttattgagattcaattttcatatagtaaaacgcctatttaagtgtacaaggttttgaaaaatctatacacctgtgtaaccaccaccacctgtgtaaccaccaccgccagaaccaaaaacgtttctgtcacccaaagaagttcccttttgccttttcctagttaagcccactccagccccagataaccactttctatcctcatagattagtgttgcttggtttagagcctcatacaaatggattcatttactatgtgttcttttgcgtctgatgtctcactttggcatgtttttagactcatccaagctgttttgtgtttcagtagttctccttgctgaatagtattccattgtgtggataagccatcatttgtttattcatccacgtgttaatgggtttccagtctcggctcttaaaactatgagcatttgtgtaaaagtatgtatttgcacatgtgtttttatttctcttgggtaagtacctaggactttaattgctgtgttgtaagtgtcttagttcattcaggctgccataacaaaataccatcaactgggaggcttataaacaacagaaatttatgttttacagttctggaggctgggaagtccaagatgagggtgtcaacatttggtgtctagtgagggcctgcttccttttaagtagatgtctttttactgtgactgcacgtggtggaaagggactagcaagcttaccccattcatgagggctctccccttgtgattctgtcccctccccaagaccccacctcatatcatcttatgggttaggaatttgacatgaattgtgcaaggatgtaaacattcagtccattgcaatgcgtgtttctaacttcctaagaaattgtcacacagccctctgtagtggttgaatcattttacactattactacattatgggaagattccagttgctccatatctttgctaacacttggcattgtcagtctcttaaaatttaatccactctagcctccttatgattttaatttgtatttgcccactgaataatgtatgtctatgatttcatctgcttattgcttttccgtgtcgtcttttgtgatgtgtctgttcgtgccttttgcctgtttttaagttgggatgcttattgttgactcaagttctttccatattctgcatgaaaaacatacatgtaatatatagaattctttgtctccatttgtgacaaatattgtgaatattttcatgtttggtttgcctgttcattttcttaatggtgtcttttgaatattttttattaagccaccactcctggccaactgtagttgaactcaggtattggaagggcttccgttttgttcttttcccattttttttttttgacttctagatcctttgcattttcgtataaaatttgaagtcaacttctatcaacttcaggccaggcccgtggctcatgcctgtataatcccagcactttgggaggccgaggcgggcggatcgcttgaggtcaggagttcaagaccagcctggccggggtggtgaaaccccatctctactaaaaatgcggaagagttagccaggcgtggtggcaggcgcctgtagaatcccagctgctcgggaggctgaggcaggagaattgcttgagcctgggaggtggaggtttcagtgagctgggatcgtggcattgcactctagcctgggcaaccaagagtgaaactgtctcaaaaaacaacttttatcaatgtctgcaaaaagaaagtcttctgggatttatagatcaatttagggagaaatgacattttaacaattctgagttttccaattgttgaacatggtgtactgccccatttatttagatctgttaatttctctcagtttgcagctctcacattttgttaaattcatgtatttaatatttctgcatgctattgcaagtggtaaggttttcaaaaagctgttttctagttattgctagtatatagaaatgcattagacttgtacattgatcttgtatcaagcaacttagatcagttaacttattctagtagcttttttctagattctttagcattttctatgtagataatcatgtcatctgtgaataaagtattttacttttccaattt

SEQ ID NO: 580 - DNA, 5177 bp, Homo sapiens
gcttatattacttatatgctagtttggatccaaatgctgtaaaagctctcaacgaaatgtggaagtgtcagaacatgcttcggagccatgtacgcgaactattggatttgcacaagcagcctacatcagaggctaactgttctgccatgtttggaaaactgatgaccatagcaaagaatttgcctgaccccgggaaagcacaagattttgtgaagaaatttaaccaggttctcggcgatgatgagaaacttcggtctcagttggagttattaattagcccaacctgttcttgcaaacaagcagatatttgtgtgagagaaatagcccggaaacttgcaaatcctaagcaaccaacaaatccttttctagagatggtcaaatttctgttggaaagaatcgcacctgtgcacattgattcagaagccataagtgcactagtgaaattgatgaataagtcaatagaggggacagcagatgatgaagaggagggtgtaagtccagatacagctatccgttcaggacttgaacttcttaaggttctgtcttttacacatcctacctcgttccactctgcagagacatatgagtccttgttacagtgcctaagaatggaggatgacaaggtagcagaagctgctattcaaatttttagaaatacaggtcacaaaatagaaacagaccttccccagatacgatcgaccttaattcccattttacatcaaaaagcaaagaggggtactccacaccaagcaaaacaggctgtgcactgtatacacgccatattcacaaataaagaagtccagcttgcacagatttttgagccactcagtaggagtctgaatgctgatgtgccagaacaacttataactccattagtttcattgggccacatttctatgttagcaccagatcagtttgcttccccaatgaaatctgtagtagcaaattttattgtgaaagatctgctaatgaatgacaggtcaacaggtgaaaagaatggaaaactgtggtctccagatgaagaggtttcccctgaagtactagcaaaggtacaggcaattaaacttctggtaaggtggctgttgggtatgaaaaacaaccagtctaaatctgccaattcaacccttcggttattatcagcgatgttggttagtgagggtgacctgacagagcaaaagaggatcagtaaatctgatatgtctcgcttgcgattagctgctggtagtgccataatgaagcttgctcaggaaccttgttaccatgaaattattaccccagaacagtttcagctctgtgcacttgttattaatgatgagtgttaccaagtaaggcagatatttgctcagaagctgcataaggcacttgtgaagttactgctcccattggagtatatggcgatctttgccttgtgtgccaaagatcctgtgaaggagagaagagcacacgcacgacaatgtttactgaaaaatatcagtatacgcagggaatacattaagcagaatcctatggctactgagaaattattatcactgttgcctgaatatgtagttccatacatgattcacctgctagcccatgatccagattttacaagatcacaagatgttgatcagcttcgtgatatcaaagagtgcctatggttcatgcttgaagttttaatgacaaagaatgaaaacaatagccatgcctttatgaagaagatggcagagaacatcaagttaaccagagatgcccagtctccagatgaatccaagacaaatgaaaaactgtatacagtatgtgatgtggctctctgtgttataaatagtaaaagtgctttgtgcaatgcagattcaccaaaggacccagtcctcccaatgaaattttttacacaacctgaaaaggacttctgtaacgataagagttatatttcagaagagacaagagtacttctgttaacaggaaagccaaagcctgctggagtactaggtgcagtaaataagcctttatcagcaacgggaaggaaaccctatgttagaagcactggcactgagactggaagcaatattaatgtaaattcagagctgaacccttcaaccggaaatcgatcaagggaacagagttcagaggcagcagaaactggagttagtgaaaatgaagagaaccctgtgaggattatttcagtcacacctgtaaagaatattgacccagtaaagaataaggaaattaattctgatcaggctacccagggcaacatcagcagtgaccgaggaaagaaaagaacagtaacagcagctggtgcagagaatatccaacaaaaaacagatgagaaagtagatgaatcgggacctcccgccccttccaaacccaggagaggacgtcgacccaagtctgaatctcagggcaatgctaccaaaaatgatgatctaaataaacctattaacaagggaaggaagagagctgcagtgggtcaggagagccctgggggtttggaagcaggtaatgccaaagcacccaaactgcaagatttagccaaaaaggcagcaccagcagaaagacaaattgacttacaaaggtaaaaatgcatttgcaaagggagaaaatgaaggccaaacagaagcaggctccagcttctgcaaaaacttggattcacaaatgtccctgaacagaaaatgaagctcacttcagaacacacactctctgccttgaaaactaaagagactattacttccttttcacatgaccacaagtcctctgatggaaatgtacagcagaaactcttgagagagaggctaaaagcaactctgttctcccccttcccctagacttttcttacgaaaagtcaataattaagcaaattgcttaacacttggttccagttcctgcctatctggagtttaaatgcgtaatacaccattaatttccacgctgcagtttttattttaaagaaagtaacaagatgtctttacactgacactgaaaattcatccattttagagccaggaattcccatgttacacaggaaaaaatagaagtctactgaattaattttttaaaagaaaagagatcagattaaatatttctttgtttttccttttggaaacttttatgtataattctttctgcctgcctacttttctgcaaaaatgagatgtacagatttcggttccctgctatgaaaagtgatgtggtagcaattttataaatgttgctttctgatttttatcagagtgagaaaattaaaattattgatttgcaagtagtaaacagttcatattttgatttcccctcattttagtttaatataatttgcaataaatgtacatattgttgtttgtttcataaagcatatcactttaaaatggtttttactcctgtgattatgttggaatatttggaattttaaaggagtaaagactgtccagcatttggttttataatgtttgtcaccagatttttattaatgtaaaaaatcaatttttaaaaaatagttggactttggcagcttttaaggaaagttggaggtgttttaggattgctatcaattttcagcattgtgctatttggaaataagtgttttgcttttgtctgatggtctgggctcatttttatgtttattttagaaaactgttgcatcaatatattatgtttcttggcattgttcagcataggtaatgtgtgcactttatgtgtacacataatcatatttaagttttttgcataaaataaatgcttctagatgtcatggcagtctttttaatctttttatcatatgctttcttgtgaattttttcatgttaaagagctaaagtcataacatgattacagtcaactctccattatctatataaaatagtgactaagcctcaggtttttaattttgtgataacaaaataacgaaggcatgtaagacctgattctggaggaacatgaaatttgtcttttctcatgtccagagttctatcctgcccccactgtccactgtagggtcatccgcaaagccctagcagaatgtgctcactccatttccttacacgtttctagcatgggtcagaggaaacaacatttgtgttataacttcgtcttgataggctgtagtgtacatgggatgtaaaacaaacaagtgtatcaaaggtggatgattctgttagagtgaagtttgagagtaaatgtcacttacgtttctcatagatgatcaagagttggctgtgtattgactgaaagatgggtaattattttaaatatgcatttacacacatttaggtatcagaagatgcttagggaacaatggataccaatgatagaaaatgatacctttacaggggcagaaaaatccccactcttccttattgcctcttcagaaccctttagaaagtataaaatattgcctccaacatgctgaaaaagagtatctatgcataagtatcagagaagtccctcaagcaatcagtaggtgtgttctatttagagagagtttaaagttctcttagcatcagacaacttgattcctaaggtttccagtgtgtcaccaacaaaaagtgcattgatagggacctttgtctcttcctccctttgattaattgcccggcatcacagtttactagattaccaagtgttacatcatattaaataaaatgtagcagaaccatctgcatcaatatattcctgtttagatttttgcaggagagaagttaaaaggatttgctccttgtatgatgtaagtggcccaccccaattttgtaacatgatgcaagtgtctggcactaagggaagcaagagtagggttgtggaaagaccaagctgatggggagggacttgtttacgggaatttttttagttttccttttcaaaggaaaacattaaaatcccttaggaatttggtattcacatctcagagaactacaacacaaaagtgcagacttatatttgagaattaatgttaaccctttgtgtctagtttgaagcttcttgtatttgtctaaaacaacaagccagaattttgtatctcctttgataaaaagtgtgtataatgtaaagtagttttgcatattcttgtgctgcacatgggctgaatttttaaattttttttaaaaacttgaagcagaaccttgtaatttgtgtaaatgacaagtgtaaaatcctaccataaaatgctaaaaatatgcactgtttcaaataaaaccaagaaatgcagcatt

SEQ ID NO: 581 - DNA, 3920 bp, Homo sapiens
gctgatccgtctgttgggaggacagatatctcaaggccaggatggaagaatcaccactaagccgggcaccatcccgtggtggagtcaactttctcaatgtagcccggacctacatccccaacaccaaggtggaatgtcactacacccttcccccaggcaccatgcccagtgccagtgactggattggcatcttcaaggtggaggctgcctgtgttcgggattaccacacatttgtgtggtcttccgtgcctgaaagtacaactgatggttcccccattcacaccagtgtccagttccaagccagctacctgcccaaaccaggagctcagctctaccagttccgatatgtgaaccgccagggccaggtgtgtgggcagagcccccctttccagttccgagagccaaggcccatggatgaactggtgaccctggaggaggctgatgggggctctgacatcctgctggttgtccccaaggcaactgtgttacagaaccagctcgatgagagccagcaagaacggaatgacctgatgcagctgaagctacagctggagggacaggtgacagagctgaggagccgagtgcaggagctcgagagggctctggcaactgccaggcaggagcacacggagctgatggaacagtacaaggggatttcccggtcccatggggagatcacagaagagagggacatcctgagccggcaacagggagaccatgtggcacgcatcctggagctagaggatgacatccagaccatcagtgagaaagtgctgacgaaggaagtggagctggacaggcttagagacacagtgaaggccctgactcgggaacaagagaagctccttgggcaactgaaagaagtacaagcagacaaggagcaaagtgaggctgagctccaagtggcacaacaggagaaccatcacttaaatttggacctgaaggaggcgaagagctggcaagaggagcagagtgctcaggctcagcgactgaaagacaaggtggcccagatgaaggacaccctaggccaggcccagcagcgggtggccgagctggagcccttgaaggagcagcttcgaggggcccaggagcttgcagcctcaagccagcagaaagccacccttcttggggaggagttggccagcgcagcagcagccagggaccgcaccatagccgaactacaccgcagccgcctggaagtggctgaagttaacggcaggctggctgagctcggtttgcacttgaaggaagaaaaatgccaatggagcaaggagcgggcagggctgctgcagagtgtggaggcagagaaggacaagatcctgaagctgagtgcagagatacttcgattggagaaggcagttcaggaggagaggacccaaaaccaagtgttcaagactgagctggcccgggagaaggattctagcctggtacagttgtcagaaagtaagcgggagctgacagagctgcggtcagccctgcgtgtgctccagaaggaaaaggagcagttacaggaggagaaacaggaattgctagagtacatgagaaagctagaggcccgcctggagaaggtggcagatgagaagtggaatgaggatgccaccacagaggatgaggaggccgctgtggggctgagctgcccggcagctctgacagactcagaggacgagtccccagaagacatgaggctcccaccctatggcctttgtgagcgtggagacccaggctcctctcctgctgggcctcgagaggcttctccccttgttgtcatcagccagccggctcccatttctcctcacctctctgggccagctgaggacagtagctctgactcggaggctgaagatgagaagtcagtcctgatggcagctgtgcagagtgggggtgaggaggccaacttactgcttcctgaactgggcagtgccttctatgacatggccaggtgagttcaaccagcaaggccaggagggaggtgggaggaggtcagagggaaagggcatctgtgtggacagtcaccaggccctgctcccaacccctgcccttcttggcctcagccaagaaaaggagatacaggtatggttaacaaggaaaatgactcactgctccaaatcccagatgccttcaggtaatccctacccctatcttatcaatgcactcagaggtcctgcctttaactggcttctatgttgttctagcaccatcttctgcagagcccaaattgccctgcttcccctctctcctgcctctaccccttccccaaccaccaggtaggtacctagggtcctccggggaggaagggaggtgaccatggcccccagggataggagcagagagaagactgggatccagcatccatctggctacaactgaaatgctttccctcttccctgacttccctgggtaacccttagggaagggaacctatagaggtgggggtttcaggtatcagattgtccccttctgccttcccttttattcccaggttcaagggggcaggcacagggaagagagatttgatcatctagtcccggttttgcctggatgtgagatgggctcagggcagggagggggtgatgctgtcatccttctcggctggagcaggaagatgaaggacgatgtcagactcattttcagcctcattaggcagcagacggagatggagggaggagagcaggaggctgggggatgggctctgcactgcagagaccagcagggactaaagaagagaggacatggggaactggaaaaataagccttccaggattgtggggagaaagacactgtgggagaggccaggatgctgcattaggcacaggataacctgggaacccaggcacatgggtcctgctctccgaagtctgcaagtcaagaagggaacagagcacgccgaccctctccctttcccctctgtctctcttagtggctttacagtgggtaccctgtcagaaaccagcactgggggccctgccacccccacatggaaggagtgtcctatctgtaaggagcgctttcctgctgagagtgacaaggatgccctggaggaccacatggatggacacttctttttcagcacccaggaccccttcacctttgagtgatcttactccctcgtacatgcacaaatacacactcatgcacacacacactcacacacatgcatacacttaggtttcatgcccattttctatcacactgggctccatgatattctgttccctaagaactgcttctgtgtgccctgttttcatcccaagatttctcacttcatcctctcctacctggctcttttgtcccagggaggggtcctgttcggaagcagtggctgaatttatcccctgaaagtggttttggaggaaccgggatggaggaggccttcccctgtgggaatagaatcgtccactcctagccctggttgcttctgatacacagccactgcacacacacactcacactcacactcccttgtctgatgccccaaagccaattcctggggcaccctaccctctcttatttggagtttccgttggtttacctgagttttctctggggtctgcacagaggcagcagcatggacatcatggcctctcaggtcccttttggttctcagtttcattggttcctctttctgttcccccattgacttctgtgccccaccctagccttttccataaccttaggtattcagtttggaggggttttttgtatttttgaggattcctgtattctgtatcctctcctcgcatctcctcacatggaaagaaataatgtatttgtgccttctgtgaggaatggggggaacaagtggtcccaggtatccccatttccaaggcccccctccctctccaggtccccccacagcaataaaagcttccccctgatatccatccctttgtagtttgaacaaatatatttatatgatatgt

SEQ ID NO: 582 - DNA, 5771 bp, Homo sapiens
aatggcctgtgagtcagaggggcagtggagtcggcggcgcggagccggggcggccccggggagggaccgtcgcagggaggggcgcggcagcggctggggggctgcgggcgccagggcccgctagtgttgcacacgaagctgaacagcgaagagcctagcagagcagggctcagcctgagccaccctttgtctgggttgggggcccgtggcagggaggaccggggaaccaaggggagggaccgggacgggacgggacggaagggaccggagcagcggccacctccgcggagccaatttgggagcggggtgagtgtgctagagggaaagagcaaatctccgaagctccagtatagtatggggcctgtcccaggctgtggggaggagaggagtgagaagggacctgggaggctgggcagggggtaagggatcgtccagaagaaggagtccaggagtcaggtgagtctgcctggcttagtttagagagtctgctaaggtctgctctctcccctctgaagatagagggctctaggctgggggccgaggggttggtaagagagaagaagtcgaccttcctacccacagtggtggtccgtgggaacagcccccctagcttgtgtggatgtatgtagggacaaaatagagagcagctggcagcagttctctttgcataggatgagggtggaaagcacatggataggaattcatcctgtcactctccttgatcatggtagaaatggaaatctttaatactgaagggaaggggagaatgagccttgaagctgatacctataccaatacccacctcacccacctcccaggcctcaaaagtgtctaaaggtacagacgtattctgggacttgttgtttttgctggccttgctccctcagcatgttgggagctgtagtccttgccagccacagcctggcacagctgtttgatgccagctgctgcccaccccctgaacgaagagtgaggcttggcctactctgccctgcccccctcccctgcagtcctgccccatgagtcagcttgaagccatggtctagagccagactggctgggtggcaggggagtgaatatagagcgtcttgttgacagggtgggaactgagagggctctggggttaataagcagatgccaggtatgctggggtcaagtagggcatcatgtcatcccctggcttccccagggcaaggggtcaagagggcaactgggatgacctggaagtggtggtgctagggaaaaggcccctcctgaatctgtatggcttgggtggaggaaagaagggtagaaattagtgcaggttgtaccttctgacaaggttggttgcaggtaggatagtgcaggttgcgattggtgttctgccctttccagccatcccgcccaccacagggaaccaggattttcttagggatcccaattcttaggagaatttggtgaaatgggatagtggggtacaatgatgggaacttggtgtaggagagcttttcagtccctgggtacaaatctctcctttctgcctgctccccacccccacctctgttcctgattttcccttgtacaattaatctctctgcttctctcatctgggaaatttttctctccactctcaggactgctgctcagatgtctgggacttgcattctactttttttgagccctgctgtgtgcttacccctgtacttggggttggatggaggggtgggacacagatctgtcctcaggaactctatggtcggtctagaagatgccttacccacaggagtgagcagaactgttagtgagcttacaggaagtagtaacactgccataggtgaggtctcagagaagggagagatgcttatggtctggggtggacagagcagactttctggaggagatggcatttgacctatccaaggaggaaaagtcttgggtaggcattcaaagggcacttcttgaaggggaaagagcaccgtgaatgtcagacagcaaaagagaaggctgaccctgggggcagttggctttcaacttgacattcccctcaccctagtatgggctggaatagttagtgaagaccatcttatgcaccagtggtttggggttttggtgttgggtgtgtgagcactgggggaggggcgtggagaggtactccctagttgcttccagctgactgactgctgcggccttatctctagtttgcagggccttgcgggagggccctggaaagtgccttctggcagtgaccccttccccttccccttcttgtttttggtcggatttgttgcctcttgttaaagagacaggctgctggaggcaatttggagttcagggctgaaaggccagctctgagctgacttgaaatttgtacctctgaggaccgctgatggggtataactgtgtgggagacctctgcccttagtgccctaggatggcacttgtccctttggagatagacatataagaaggagttgtgcaatttggtggctttgagtaagaaagctgaattcttcccctggccgcctctcagctgacacggtctcttggatcttgggggtctctcatcccttcctccatgtagggcaggagtcctcaaatggtggccctgacaagtagttattctacctcaactcacttgtcacatccttattatactgagccaagacctgcctctttgactccttaggtagcccaactctgccatctgtgccctggaccccaagcctaccctttctgttcctgaagagcctctcacatgggagaaggatgtcctggagtgtactattagcctataattggtgacaggccttaccgctggctccagtgatcctggcttacgtctgttcttctctcctcagggtcctgctgagctcaggagctgcacggaatggtggcagtcaccttgccagtgcagcaggcatggatcagactgcaagctaggggcacgaggcatcagttgggaagaggggacgcacagctaggcttgaggcctcttcatcgggatgtccccaggccccccagcccaggcccagcataaaggccgtgttggggggcccccctgacccaaggggggcttcatgcgccacgtgcaggcggagccgtctccatcctcagagccggaggctggcccttcacagcctccagtcaggcagggggccctccagggtggcctgctcatgggctacagcccagcagggggggcgacatcccccggggtctaccaggtatccatcttttcccctccggctggtacctctgagcctcatagggccctgaaacgacaagccccatccactgagggtccccgggagctgaagagaggccctgggctgggggccagagagggactaccccctgaagaaccatctactgtggggctcttaggcccagagggaccggggctgggactaggtgtggccagccagcatttctcccaccgtggcctctgtgttgtggaacagagaagtagtgtcacctcatcttggacttcaggggcctggagtcccccctgccccccatcaaatgcttcctgcaatactttgcacaccagagactgggcctccccagatccagggggacaggggtccctgggggagtccccagggccagcccctccaggccagctgcacacacttgacactgatttgcacagtcttgcacaaatagggggtaagagcccagtggctggggtgggcaatgggggtagcctctggcctagggagtcccctggcactgccaatgggcacagtcccgagcacacaccccctggccctggacccccaggcccctgccccaccaagcgaaggctgcttcctgctggagaagccccagatgtcagctctgaggaagaggggccagcccctcggaggcgccggggatccctgggccaccctactgctgccaacagttctgatgccaaagccacacccttctggagccacctgctgcctgggcccaaagagcctgttttggacccaacagactgcggtcccatggggcggaggctgaaaggagcccgtcgcctgaagctgagcccccttcgaagcctccggaaggggccaggcctgctgagcccccccagtgcctcccctgttcctacccctgctgtcagccgtaccctgctgggcaactttgaggaatcattgctgcgaggacgttttgcaccatctggccacattgagggcttcacagcagaaattggagctagtgggtcatactgcccccagcacgtcacgctgcctgtcactgtcacattctttgatgtttctgagcaaaatgccccggctcccttcctgggcatcgtggatctgaaccccttggggaggaagggttacagcgtgcccaaggtgggcaccgtccaagtgaccttatttaaccccaaccagactgtggtaaagatgttccttgtgacctttgacttctcggacatgcctgctgcccacatgaccttcctgcgccatcgcctctttttggtgcctgtgggtgaggagggaaatgctaaccccacccaccgcctcctctgctacttgctgcacctcaggttccggagctcccgctcaggccgcttaagcctgcatggagatatccgcctgcttttttcccgccggagcctggagctggacacagggctcccctacgaactgcaggctgtgaccgaggcccctcataatccacgttattcacctttgccctgattgccagcactctgaacccatgcgggctaatgacctgcccatcctgctccatcttagagaacatatatggagagacagcaagagacccttcaggcttgaattaaagccctcaccatgctcacgcccaaatggattatttgggtgtttaaagcttctgattcttactacaccctgccctacttcgggtactccatgtgcctgtcccctcccttgggtttcccaggccagcttaggtagtagggaggaactggagctaccctgagattttctcaagttcccaggcaagttatgccagcgttgcctccctgtcctgggcaggggccacttgttattttatttatttttaatttataatttattcaaattggattgccttggtaacctcccacacctgataattggcatcactcctccccgcttcccactctcagatattgctccaacctcaggagttgaagaggcttatgcggtgggggcaggaggagaactgctttccctcagctgagggaagaggggctattccagagggactgagtcagtagccaaagactcagcttcccctgtccttccccagtcccttcacttcccctaccctctgacctatctctgaaagccaagttatgcgtatgtgtgtgtgcacaagcttgtctttgtgtggtatgtgtgtgtgagtgtgcatgtatgcacacacacaggggttaaccacccctcacctagggctccagactccagttgtccctctcctcctacctgtgtctccttgttttggggtcctgactgaagaaggtgtccagggggcagagtcagggccaagcactggggtgcctcctctcacctggccagactctgacccacctacctcagctggggtgaggggcacccctcaaactcagtcatgtggttccaaactaccccattccccactccagactctgacccagcctcagtcctaactcctggggctgggctgaggggaacaagcatttgctgaaacttgaaaaaacaaagcaaatcaaaaacaggaaaaaattgtacctggtacttttttttagaaaaaaagattaaaaaagaaagaataaattcttgtttggaaacttg

SEQ ID NO: 583 - DNA, 2921 bp, Homo sapiens
ccctccttggcaccatgaccacctgcagccgccagttcacctcctccagctccatgaagggctcctgcggcatcggaggcggcatcgggggcggctccagccgcatctcctccgtcctggccggagggtcctgccgtgcccccagcacctacgggggcggcctgtctgtctcctctcgcttctcctctgggggagcctgcgggctggggggcggctatggcggtggcttcagcagcagcagcagctttggtagtggcttcgggggaggatatggtggtggccttggtgctggcttcggtggtggcttgggtgctggctttggtggtggttttgctggtggtgatgggcttctggtgggcagtgagaaggtgaccatgcagaacctcaatgaccgcctggcctcctacctggacaaggtgcgtgctctggaggaggccaacgccgacctggaagtgaagatccgtgactggtaccagaggcagcggcccagtgagatcaaagactacagtccctacttcaagaccatcgaggacctgaggaacaaggtgggtgactttggtgtatggagcactgagagaggctggggctacagtggcccttgggatacctctttttagcaattacactttacaaacagggagactgggcacctttggggagtggccaggatcacccagggaagtggtagcagagggtcccttttcagtatctctgtgcccggactggggctgttaccctaaatctcttatttccttcaagggttcagctgcaagttcagcttccctgccttgggcccaggaagggggtgatcgggatggagtgcatccctacgtagcctgagctggtggagaaggcatgccagccctgccagccagaagacttccagatttggggcggttccttttgcccctttctgcctttcatgctcaagtagtaaggtccttggctgaccagggctcctgtcctccatccccactccagatcattgcggccaccattgagaatgcgcagcccattttgcagattgacaatgccaggctggcagccgatgacttcaggaccaagtgagcagccagcatggtgggctgggggcagagggcaagggacaaagagtggggtggtccacccagcagggccagcagaccccgagcctcagaatcctcagggctggcagcctgaggacctgacctctgtcctgccaggtatgagcacgaactggccctgcggcagactgtggaggccgacgtcaatggcctgcgccgggtgttggatgagctgaccctggccaggactgacctggagatgcagatcgaaggcctgaaggaggagctggcctacctgaggaagaaccacgaggaggtacggtcgctgctggcttccggggtgggaggctggtttggtggggttgccagatgcacccagggccaggagagaagtctgctgaactgaccgcctcctgccatcccttcccaggagatgcttgctctgagaggtcagaccggcggagatgtgaacgtggagatggatgctgcacctggcgtggacctgagccgcatcctgaatgagatgcgtgaccagtacgagcagatggcagagaaaaaccgcagagacgctgagacctggttcctgagcaaggtggggctcgggcccgcagtgagcctgcagcacttcccagctgggggctttgggagagcctcacctttcactctgctttcctgcctcagaccgaggagctgaacaaagaagtggcctccaacagcgaactggtacagagcagccgcagtgaggtgacggagctccggagggtgctccagggcctggagattgagctgcagtcccagctcagcatggtatgaaggacccagcacagcagcagcccccaagtcaccagtaatggccaccaccccctcaaaaagccacagtctagttccacctttcttttctcaggatgggaccaggggactcatgggaccgttatatagatagagaaactaagccctagaatagtgggctagcttttcgccatattgtctggcccatcagtaccccaactgggatcaaaatccaggcatctctcaaaaaacatgcccagagacctggaggaacaggagtgaccacctccatggactctttttctctctctcacttgcagaaagcatccctggagaacagcctggaggagaccaaaggccgctactgcatgcagctgtcccagatccagggactgattggcagtgtggaggagcagctggcccagctacgctgtgagatggagcagcagagccaggagtaccagatcttgctggatgtgaagacgcggctggagcaggagattgccacctaccgccgcctgctggagggcgaggatgcccagtgagtcccaggcccctcagttctgcctcccagaccctttagcccccctgctgctctcagcacaactgactgccctgccttttctctcccacagcctttcctcccagcaagcatctggccaatcctattcttcccgcgagggtaaggcttccgaggctccccggcactgcagcccctctgcctgtttccatggagtgggggctgggcccttctcctcagagctcccagccctcccttctccctgccctggagtcagcttagctctcagaccccttctcacctcctcttctctctcccacagtcttcacctcctcctcgtcctcttcgagccgtcagacccggcccatcctcaaggagcagagctcatccagcttcagccagggccagagctcctagaactgagctgcctctaccacagcctcctgcccaccagctggcctcacctcctgaaggcccgggtcaggaccctgctctcctggcgcagttcccagctatctcccctgctcctctgctggtggtgggctaataaagctgactttctggttgat

SEQ ID NO: 584 - DNA, 1622 bp, Homo sapiens
ggaatcaggttttgaaactgacttccagagctccactgcctccctgcaccatgccctacaacttctgcctgcccagcctgagctgccgcaccagctgctcctcccggccctgtgtgccccccagctgccacggctacaccctgcccggggcctgcaacatccctgccaatgtgagcaactgcaactggttctgcgagggctccttcaatggcagcgagaaggagactatgcagttcctgaacgaccgcctggccagctacctggagaaggtgcgtcagctggagcgggacaacgcggagctggagaacctcatccgggagcggtctcagcagcaggagcccttgctgtgccccagctaccagtcctacttcaagaccattgaggagctccagcagaagatcctgtgcagcaagtctgagaatgccaggctggtggtgcagatcgacaatgccaagctggctgcagatgacttcagaaccaagtaccagacggagcagtccctgcggcagctggtggagtccgacatcaacagcctgcgcaggattctggatgagctgaccctgtgcaggtctgacctggaggcccagatggagtccctgaaggaggagctgctgtccctcaagcagaaccatgagcaggaagtcaacaccttgcgctgccagcttggagaccgcctcaacgtggaggtggacgctgctcccgctgtggacctgaaccaggtcctgaacgagaccaggaatcagtatgaggccctggtggaaaccaaccgcagggaagtggagcaatggttcgccacgcagaccgaggagctgaacaagcaggtggtatccagctcggagcagctgcagtcctaccaggcggagatcatcgagctgagacgcacagtcaatgccctggagatcgagctgcaggcccagcacaacctgcgatactctctggaaaacacgctgacagagagcgaggcccgctacagctcccagctgtcccaggtgcagagcctgatcaccaacgtggagtcccagctggcggagatccgcagtgacctggagcggcagaaccaggagtatcaggtgctgctggacgtgcgggcgcggctggagtgtgagatcaacacataccggagcctgctggagagcgaggactgcaagctgccctccaacccctgcgccaccaccaatgcatgtgaaaagcccattggatcctgtgtcaccaatccttgtggtcctcgttcccgctgtgggccttgcaacacctttgggtactagataccctggggccagcagaagtatagcatgaagacagaactaccatcggtgggccagttctgcctctctgacaaccatcagccaccggaccccaccccgaggcatcaccacaaatcatggtctggaaggagaacaaatgcccagcgtttgggtctgactctgagcctagggctacttgatcctcctcaccccaggtccctctcctgtagtcagtctgagttctgatggtcagaggttggagctgtgacagtggcatacgaggtgttttgttctctctgctgcttctacctttattgcagttccccaaatcgcctaataaactttcctcttgcaaagcaaaaaaaaaaaaaaaaaaaa

SEQ ID NO: 585 - DNA, 4323 bp, Homo sapiens
gcagaaggccattactgctccagtcagcctcttccaggactcccaggcagtcactcacaacaagaatggcttcaaactgggcatgaagttggaaggcattgaccctcaacacccgtccatgtacttcatcctcaccgtggctgaggtatgtggctatcgcctacgcctgcactttgatgggtattctgagtgccatgacttctgggtcaatgccaactcccctgacattcaccctgctggctggttcgagaagacgggccacaagctgcagcctcccaaaggttacaaggaggaggagttcagctggagccagtacctgcgcagcacaagagctcaggctgcccccaagcacctgtttgtgagccagagccacagtcccccacccctgggcttccaggtgggcatgaagctggaggctgttgaccgcatgaacccgtcccttgtctgcgtggccagtgtgaccgatgtggtggacagccgcttcctggtgcactttgacaactgggatgatacttatgactactggtgtgatcccagcagcccctacatccacccagtgggctggtgccagaagcaaggaaagcccctcacccctccacaagactacccagaccctgataacttctgttgggagaaatatctggaagaaactggggcctctgctgtccccacctgggccttcaaggtgcgaccccctcacagcttcctggtcaatatgaagctggaggctgtggaccgcaggaacccagccctgattcgcgtggccagcgtggaggatgtggaggaccatcggataaagatccactttgatggctggagtcatggctatgatttctggatcgacgctgaccacccagacatccaccctgccggctggtgctccaagacaggacatcccctgcagcctcctctcggacccagagagcccagctctgcctcccctgggggctgtccccctctcagctataggagcctgccccacactaggacctccaaatacagctttcaccaccggaagtgccccactcctggttgcgacggctctggccatgtcacaggcaagttcacagctcaccattgcctctcaggctgcccactggctgagaggaaccagagccggctgaaagcggagctgtctgactcggaggcctcagcccgcaagaagaacctctcaggcttctccccaaggaagaagcctcgccatcacggccgaattggacgccctccgaagtatcgaaagattccgcaggaagatttccagaccctcacgcccgatgtcgtgcaccagtccctcttcatgtcagccctgtcggcccaccctgaccgctcactctcagtgtgctgggagcagcactgcaagctcctgccaggagtagcgggcatctcagcctcgacagtcgccaagtggaccatcgatgaggtcttcggctttgttcagaccctgacaggttgtgaggaccaagcacgcctcttcaaagacgagatgattgacggcgaggccttccttttgctgacacaggcggacattgtgaagatcatgagcgtcaagctgggcccagccttgaagatctataacgccattctcatgttcaaaaacgctgatgacaccttaaagtgactggcccagggctgggccctcctgcagcccctgcttggcctccctctccagctgatgctttcttcctgacctgaattcctcataccccacacgtccccatgctccacctatatctgaccaggctggtccttcttagagggtgcatgggagctgaggagccctggggagggtaggcacccagccccaagtcctagagctcattcgtcaccaggcatgttggtgagggcatgactggcaggggcattactcatggagtcagttggactgtggcagccccacagccccagtggacttttattgtattaccaaagggtctttttcttggcagtggaggagagactagtagagcagcagtccttcaatctgaggcccctttcccttttttggtatctctgtgtacttttctctccttggctcctttcctcctgccaagaagtgaccccaccacaaatgtatttactcctggaggtacctcctctctttctgtctgctggttttgctgccctcattctgctgcttcgtttcctgggcagtgcccccagccagaccccactggctcttccccctgagatatgtgaacctcggaaacatgttttcctaagatcccttggaagtctctagctgcctttctctcttttgcccagaattgagagattttgagccaagatgccttcctgaacttacccagttctggaccagttggcattttagtgtcccacgccaagtccaagtttcagcagaatgagcaggtggtttgagcctgttttatagatggcagaggttgaggttccactgctgttttccatacacccttcatgtgttgagtctgggaaggagtaagcctagcctgccagtagcctaggttaggagaccagcataaggatttgttagacaatctcgggtctttggccagaggggcagctccagcaggcatagtggtgcctgaagttaggaatactgtactctctgtagctttggacctcagccaaggtattgcccatggggtgatggctccaggcctgccaggccttctgccatgagaatgtagcactctgtgtagcacacacccccatgacatcatttaacctgtcccttaaatgttgaccattagctcttgcagcgtcttacaaagacgacttgaagttgggagttaggaaggtgaacttttctatctgaattctccgggtccctgaagccctccttgccgctctccatctgtcttgcactgccagctgggtccctgctggggctctgggacttccacttctcagtccacataggaacccagcttccactgagtcactgccaaacctgcctcccagcctgggtgggaagggggagagccactggtaggagccagccccacatggaggtgaggagccactgccaacctcccgtgtccaggtgctgatgtgggcctgcggagtgtggggctggtgccttcacccagaccccttcaatcatgtgatgtgtgtgtgtgtgcatgtgtgtgtgtgtgtgtgtgtggcactctcagaagtgtttgacagggtgcagatgtgaggctcagtgttgggaaaatgccaagggctattatcattaaaatttgaagctttatttttcccttagaagtgggaaacccagagctctgttgatttcctaccacaacccagtaggggcctctctctcccatgggctggacagctttttgaggaagccattcagctcccacagttgagctcccacagggctttaggtgtccattccctctcaactgcttagaggcagctttgagcacagccttcctggaaggaagctaggcaagacctgccacacagcgaaggttgggtttacaagggtgacattggtacccccttggccaagagtaaagaagaacaagtctaagccttgcttttatcttagttgtctgggtggtagcagaactcatcagctccttatcctcagtctgttcctctataaaagatgagagatgttcactgactttgtgcagtgagaaggcagcaagtactcacggctggtgctgtgggacctcacagcttctaaggagaggggctgggagggcctttgccatcagatctgccaagcacctaatgcttgcctgtggtgaaggcaagatggaccaagggccttggagaaaagggctcccaggcttctgaactttgaggcctcagcactttctgcattatcgtcaaactctttggaaagaaaccaaatcattaaaaagtagaaagaaatctgcctcttgtctgccctactgcccctttacccccactctgtccccaaatgatattattgtaccttgacctgggagcgcagagaggggagggagttggcagagacttctggtgccctctgccctcctagcaacagatgccacttatattttggcccctggcagcctcgcccagcccctgatcagcccaggcctagggcagttaggacctttctgtttattttctgaagcagagagaatgatctcagagtttgcaaatgaagccttttttgcactttcattcacatgcactttggtggggttacatttttgtacttgcctcttgtgtgtgcacatgtgtgtatgtgttctttaagagaatcttctggcttaagctaaggtgactcttgaaggagaaaaagttacaaacaaaatgtggtgtgatctgtcagtgtatcaaaacaacataaataaacttgaacaactgatacgc

SEQ ID NO: 586 - DNA, 894 bp, Homo sapiens
cttccggcaggccccgccggcggctgaaagccggggcagaagtgctggtctcggtcgggattccgggcttggtcccaccgaggcggcgactgcggtaggagggaactggttttggacgcgctggcgtcccgccgctgtgcattgcagcattatttcagttcaaaatgaactatatgcctggcaccgccagcctcatcgaggacattgacaaaaagcacttggttctgcttcgagatggaaggacacttataggctttttaagaagcattgatcaatttgcaaacttagtgctacatcagactgtggagcgtattcatgtgggcaaaaaatacggtgatattcctcgagggatttttgtggtcagaggagaaaatgtggtcctactaggagaaatagacttggaaaaggagagtgacacacccctccagcaagtatccattgaagaaattctagaagaacaaagggtggaacagcagaccaagctggaagcagagaagttgaaagtgcaggccctgaaggaccgaggtctttccattcctcgagcagatactcttgatgagtactaatcttttgcccagaggctgttggctcttgaagagtaggggctgtcactgagtgaaagtgacatcctggccacctcacgcatttgatcacagactgtagagttttgaaaagtcacttttatttttaattattttacatatgcaacatgaagaaatcgtgtaggtgggttttttttttaaataacaaaatcactgtttaaagaaacagtggcatagactccttcacacatcactgtggcaccagcaactacttctttatattgttcttcatatcccaaattagagtttacagggacagtcttcatttacttgtaaataaaatatgaatctc

SEQ ID NO: 587 - DNA, 1880 bp, Homo sapiens
tctctgtgcgttgaagccggagaccgcggcggcctcagcgaggaccctccgccccggagccgccggccggagccgcagcctctgccgcagcgcccccgccacctgtcccctccccctccgcctccgccggagccgcctcgtgcactctggggtatggccgtcaatgtgtactccacatctgtgaccagtgaaaatctgagtcgccatgatatgcttgcatgggtcaacgactccctgcacctcaactataccaagatagaacagctttgttcaggggcagcctactgccagttcatggacatgctcttccccggctgtgtgcacttgaggaaagtgaagttccaggccaaactagagcatgaatacatccacaacttcaaggtgctgcaagcagctttcaagaagatgggtgttgacaaaatcattcctgtagagaaattagtgaaaggaaaattccaagataattttgagtttattcagtggtttaagaaattctttgacgcaaactatgatggaaaggattacaaccctctgctggcgcggcagggccaggacgtagcgccacctcctaacccaggtgatcagatcttcaacaaatccaagaaactcattggcacagcagttccacagaggacgtcccccacaggcccaaaaaacatgcagacctctggccggctgagcaatgtggcccccccctgcattctccggaagaatcctccatcagcccgaaatggcggccatgagactgatgcccaaattcttgaactcaaccaacagctggtggacttgaagctgacagtggatgggctggagaaggaacgtgacttctacttcagcaaacttcgtgacatcgagctcatctgccaggagcatgaaagtgaaaacagccctgttatctcaggcatcattggcatcctctatgccacagaggaaggattcgcaccccctgaggacgatgagattgaagagcatcaacaagaagaccaggacgagtactgagggcggccgcagccctggctgactgcacggcttccccgtgcctccctccctgctccactcccacattatagtcctttcctaacacggtcggccgggtgctttgtgtcagtgctgcagcactggggagccaggcgaggggggcttgggggcatggggccggaaagcaggcagaagcccgtcctgggtggtgctggcccagttggtgggacccctgtccacacccaccctatttatttccgttgtctctctgctgtgtcgcccaacacttcccagggtgctgctgccacccgccccagccagccacctgctcctgacagccagcagctgtgtatttgacaaagtcattggtatatttttacttactggattctccttgcactttacctgttcttttccagagctgacagcacgggctccggcgcagtgtgcctggcttggcttcccttccccatggctgggggctggggtaggactcacccattctaatttattttgtcttttggcttctcagtagctaaggggaaggctgatgtcaggagagggagagggggctgaggaggtagtgctgtaggcccagggggtcagggaaagggaggggggcatgtgagggatggaaatgacctcctggcaccaggctcacccacccaaggccccctgccccagcactgaatcccagcgctgccctgaggcccccagccactccctccagcagcctggttcaccacacaaactctgcctggaccccattgtctgtctgcttcccacctgccctccccaccccctgcccctcgggcaccagcctgcatatgtgttcacttttatttaaataaacttgtgtggtaaaagtacatgccatgtgtccctcaactgaaaaaaaaaaa

SEQ ID NO: 588 - DNA, 3803 bp, Homo sapiens
ggcggcgcaaccagccttctagggcggcggagagttgtctgctggttctcagcttgaagaagattctgcagtccttattgatcctttttcttggcgttaccattttttgaagcaaagttaacctagctttctagtttgagctttctttttggccgtctttaaaaaaaattttttttttaatctataaaatagacaagagctagttctacaatgtccaagtcattccagcagtcatctctcagtagggactcacagggtcatgggcgtgacctgtctgcggcaggaataggccttcttgctgctgctacccagtctttaagtatgccagcatctcttggaaggatgaaccagggtactgcacgccttgctagtttaatgaatcttggaatgagttcttcattgaatcaacaaggagctcatagtgcactgtcttctgctagtacttcttcccataatttgcagtctatatttaacattggaagtagaggtccactccctttatcttctcaacaccgtggagatgcagaccaggccagtaacattttggccagctttggtctgtctgctagagacttagatgaactgagtcgttatccagaggacaagattactcctgagaatttgccccaaatccttctacagcttaaaaggaggagaactgaagaaggccctaccttgagttatggtagagatggcagatctgctacacgggagccaccatacagagtacctagggatgattgggaagaaaaaaggcactttagaagagatagttttgatgatcgtggtcctagtctcaacccagtgcttgattatgaccatggaagtcgttctcaagaatctggttattatgacagaatggattatgaagatgacagattaagagatggagaaaggtgtagggatgattctttttttggtgagacctcgcataactatcataaatttgacagtgagtatgagagaatgggacgtggtcctggccccttacaagagagatctctctttgagaaaaagagaggcgctcctccaagtagcaatattgaagacttccatggactcttaccgaagggttatccccatctgtgctctatatgtgatttgccagttcattctaataaggagtggagtcaacatatcaatggagcaagtcacagtcgtcgatgccagcttcttcttgaaatctacccagaatggaatcctgacaatgatacaggacacacaatgggtgatccattcatgttgcagcagtctacaaatccagcaccaggaattctgggacctccacctccctcatttcatcttgggggaccagcagttggaccaagaggaaatctgggtgctggaaatggaaacctgcaaggacctagacacatgcagaaaggcagagtggaaactagcagagttgttcacatcatggattttcaacgagggaaaaacttgagataccagctattacagctggtagaaccatttggagtcatttcaaatcatctgattctaaataaaattaatgaggcatttattgaaatggcaaccacagaggatgctcaggccgcagtggattattacacaaccacaccagcgttagtatttggcaagccagtgagagttcatttatcccagaagtataaaagaataaagaaacctgaaggaaagccagatcagaagtttgatcaaaagcaagagcttggacgtgtgatacatctcagcaatttgccgcattctggctattctgatagtgctgttctcaagcttgctgagccttatgggaaaataaagaattacatattgatgaggatgaaaagtcaggcttttattgagatggagacaagagaagatgcaatggcaatggttgaccattgtttgaaaaaagccctttggtttcaggggagatgtgtgaaggttgacctgtctgagaaatataaaaaactggttctgaggattccaaacagaggcattgatttactgaaaaaagataaatcccgaaaaagatcttactctccagatggcaaagaatctccaagtgataagaaatccaaaactgatggttcccagaagactgagagttcaaccgaaggtaaagaacaagaagagaagtccggtgaagatggtgagaaagacacaaaggatgaccagacagagcaggaacctaatatgcttcttgaatctgaagatgagctacttgtagatgaagaagaagcagcagcactgctagaaagtggcagttcagtgggagacgagaccgatcttgctaatttaggtgatgtggcttctgatgggaaaaaggaaccatcagataaagctgtgaaaaaagatggaagtgcttcagcagcagcaaagaaaaagcttaaaaaggtggacaagatcgaggaacttgatcaagaaaacgaagcagcgttggaaaatggaattaaaaatgaggaaaacacagaaccaggtgctgaatcttctgagaacgctgatgatcccaacaaagatacaagtgaaaacgcagatggtcaaagtgatgagaacaaggacgactatacaatcccagatgagtatagaattggaccatatcagcccaatgttcctgttggtatagactatgtgatacctaaaacagggttttactgtaagctgtgttcactcttttatacaaatgaagaagttgcaaagaatactcattgcagcagccttcctcattatcagaaattaaagaaatttctgaataaattggcagaagaacgcagacagaagaaggaaacttaagatgtgcaaggagatttaatgatttcaaagaaaataatggttctttgtttttaatgttaaccttttttaaatacaatactgatagttagaagaaaactattgtactcttttgttttagtggagaaataatagatgtctgttcatgtgttaagtgttatagcaaaaaaaatacacatgtggttaagttaatgaatagtttttgttttatcagaatggcaacagacagaagtactttgtagagattgacttcctaagctacttaagacaacttgcaccactaagaaaaaaatgtagaaccatttggaaaaatgaaatttagtagttccaagtttcaaagaaatgtcaacattttattccattcaataaagaacaaaaccaatagtgtttttattactttcatctgaaacattccatgttttaatctgagccttgcagactttcatttggagtttgaacccgttttggttgcatttcatttttggagaacttaattaacgtgagattggcaattgaaatgcaggtgcagttttctgttaatgtcatgctgttgtttaggtaataagaaatattaagtaattggctttagattttgtaatttttttccctgagttcctgctagatttcgtattctagtagtcaatgtattttcagtgaaatgcaaaaatattcccattatctttgaccagtattaatttttgagatcttactgcttgtcacttgaatcccgtgattgtcatacatctctggtataagcaacatttgatttttgaagtgtgtagaccatctcttcatattttcaagatgtaattttacatttctgcatttttaaaacagtttggccataatcctagatgcacgcttctaattcatgtacctgcacatgtgacctttgtgaacagaaatttgcatgtataatttgtgtttacttgtaactttctggttatatactgcttatatctgtggattcaagttactgaagtgaataccaataaaaagaaaaccctaggccatgttaattggttatacatgtttggaatgttaaccaacgt

SEQ ID NO: 589 - DNA, 42301 bp, Homo sapiens
gatccacctgccttggcctcccaaagtgctgggattacaggcgtgagccaccacgcccggcctatttttatttttagtagagatgggatctcactatattgcccaggctggtttcaaattcttgggctcaagcagtcctcctgcctcggcctcccaaagtgctgggatgacaggtgtgggccactgcgcccggcccgtgaaggagttttgagccactgctcacaacccctcaggctctggggaagcagagggagctgcagggatgtttcaatacagtcagaaggtggctctgaggggaaaacagtgttgctaactctcccacagtgcaagagatgaaatgagcaggatcagcacttttgacggggaagaagtcagaaactgcctgggccaggaagatggaaggcgtgggacctggaggctggtggtcccaggggctcggtagggaggaccctgggaggggtggcgggggtgcacccactcggaggaggacagcagttttcccgccccagctgcactgccaccacacctgtccctcccagtcgcagcattctgttcacctccattgcacccagtcccctccattcttctgtacagtccggtgtccccctcctccaggaagcccaccctgactgcatcgggttgggcctgctcttctgagtctctcctaacatgcctgactctctgagctgcctccctgaggctggaggatggggctggggattccctcggcacttgggggaccttgctatgcctgtttcttcactgtgaaaggggaaggtaacaggcctggcttcacaggcccggcttcacaggccctcagagggccatgaccaggccgttggctcctggcagccaccctggcaggtctcactgcagcccacagtgtttgctttagatagatcctccttgaggaagggaaactgaggcacagggagtggagacccagcaaggctggggaaggaggtgccacccacagatggaggctccgctggccctgcccacaggcaggaagtgagcctgttccccatcacgccgacccggcagagggcagagcccgccagcgttgccagggtgcagcatggggtcctcccttgctgatctgggagccgccccgggtccccagagggtcacacgtgggagaggctgccccgacgtggccaccgctgagctcacaggctgtggtcacagaaagtctggtctgggtgagatgacaaatttgggagatggaggtggcaaggaagggggcgtgtgactgtctgagcagaaaccaggatggtgctgggagccacgcgtgcgtcggggcaggggagggaactggcgcctccccctccccttactccatcctgccctaacccagacggtggcgctgggtggagacctcacagctagaaggcctctaggacctcaaagacggagctggagctcaattcattggtgctgcgtctgctttgacacgtgctggcccccaaaactccacccacatcaagacgccaaggggccaaggaatcggggctccaggagtgatcccagcccacccctgccccactggaaatgacacagcgaggctagagggacaggaagcctgaagggcgggctctgggggacaccgaaggttggcaggcactgaaatgcagattcgtgggccatgtccccagaattccaactcggagggcttgagatgcctgggaatcggggtgaccaccccagagtctggccctgacctgtcccacacccccaacccacagcagccaagtctccccctaccagggccccacgcagcacacacaccagcgggcatcactcatccagcccgtccagggtcctggctgcaatgaccgtgcactacgacttaccaatgaaaccacaagtcctggtgtgggagccgaggccaccagcccaggctggatgggtttgccatggcaggaaggggaatgtgaaccccagggagccgctgaggcaacagcaaggacaggattctagaagcaggacggggcgagaacaaggcctcacagccaacactcagtccaacacgcagccgcccccagccaggcagccgggtgacgcgggacagcagcatcccagacctgggccactatggaagccagcgggagctgaggggtctggtggggaggagggaagctggttcagctgtcaaacagggatgtcaaaaccccctcccaggccaggaacagtggctcacacccgtacgtagttccggcactttgggaggccaaggcaggaggatcacttgaggccaggagttcgagaccagcctgggcaacatagcaagatcctgtctctataaagggtgtcacctgtcgcccaggctggagtgcagtcacagctcactgcagccttgacctcctgggctcaagccatcctctcacctcagcctcccgagtagctgggactacagttatgcaccaccacccccggctaattgtttaaagcttttctgcagagacagggtcttattatgttgcccaggctggtctggaactcttgggctcaggtgatcctcccatctcagcctcccaaagtgctaggattacaggtgtgagccaccatatccggcctctacaaaaaatttttaaaaattagccaggtgtggccgggcacggtggctcacacctgtaatcccagcactttgggaggccaaaatgggtggatcacgaggtcaggagatcaagaccatcctagctaacacggtgaaaccccgtctctactaaaaatacaaaaaattagccgggtgtggtggtgggcgcctgtagtcccagctacttgggaggctgaggcagaagaatggcgtgaacctgggagatggaggttgcagtgagctgagatcgcgccactgcactctagcctgggcgacagagtgagactccgtctcaaaaaaaaaaaaaaattagccaggtgtggaccgggcacagtggatcacgaggtcaggagttcgagaccagactgaccaacatggtgaaaccccatctccactaaaaatacaaaaattagccgggcgtggtggcgggcgcctgtaatcccagttactcgggaggctgaggcaggagaatcgcttgaacccgggaggcagagcttgcagtgagccgagattgcaccactgcactccagcctgggcgacagagtgagactccgcctcaaaagaaaagaaaagaaaagaaaattagctgggtgtgttggtgcgcacctgtggtcccagctacttgggaggcagaggtgggaggatcgtctgagcccaggaggttgaggctgcagtgagctacaatcacaccactgcactcaggacagagcaacagaaccagaccctgtctcaaaaacaacaaaacaaaacaacaacaacaagaaaccgctaggcgtggtgactcacacctgtaatcccagcactttgggaggtggaggcaggcggatgacctgaggtcaggagttcgagaccggcctggccaacatggcgaaaccccgtctctactaaaaatacaaaaatgagcctggcgtggtggtggcagatacctgtaatcccagctactcgggaggctgaggtgaaagaactgcttgaacctgggaggtggaggctgcagtgagccgagactgagccactgtactccagcctgggcgacaagagcaagaccctgtctcaaaatgaaaagaaaaaaacctctcggggaatgaagggaacatgtacactgtactaacgccagaactctcagttgggtctgcagtgtggaggtttcctagcagagcctttcttcctagggctctgcagtgtatggacaggaaaaccatggcatggtccccaccaacaccccagcactgtccccagctgtcgggaaaacctggggcctgcggggatgggaggagaagaggagcctctggggctgcagccaggaacaagggacaggaggggagacagtgagccaggggtcgcccccagctgaggggaacaacctaaaatcactagccttagcctgtgccgacagcagagagagcgagccctgagcagcttccagtccaggccctgccttcaacatcactcactcattcattcattcattagccacagaacaccttctgtgtacaggccctggcaagacactgaagacccaaccatgaccaagcacctgccctggttcctgtccctgggaacatgcagggggagaggctgccacggagcacagattcacccagggtgcctggcaagcggggtgagaaaggagggtacatgttggggtctcagcaggagcagggccggaggtcccctagagcacctttgctggccggctggagggagacgcctgtgcttttgggtctccactttgcctgtctcccagacagggctgcctcccctcacccccagccctcaagctttggaatctgaaattttctttgctgacccaccagagaaactgggtttgaatcccagcccatgatttttgttttgttttggagacagggtcttgctttgttgcctagactggagagcggtgacaagatcatagctcactgcagcctcgaccgcccaggctcaagtaatcctcctgcctcagcctccagagtagctggggctgcaggagtgtgccaccatgcctaatttttgtatttttttttttgtagagacagggtttcgccatgttggccgggctggtctcgattcctaggctcgagggatcctcctgcctcagcctctctgagtgctgctatcccctcagtttttacctattctttacctcttgcagcctctgcctccccatctgtgacctgggagctgcaggacctttcctggggcacattatgggcctcagtgagatggggcaggtcaagtctggcataggcttagcacacagtagaccctcaataaagatctagccaatggccaggcgcagtggctcacacctgtagtcccagcactctgggaggctgaggtgggtggatcacctgaggtcaggagtgtgagaccagcctggccaacatggcgaaaccccgtctctactgaaaatacaaaaaccagctgggcatagtggcacgtgcctgtaatcccacatactaggggggctgaggcaggaggatcgcttgaacctgggaggtggagcttgcagtgaaccgggatcgtgccattgcactccagcctgggcaacagagcgagactccatcccaaaaaaaaaaaaaaaaaaagatatagcaaatgaatgaactggagcctccagcagatgggtgggaactcagagggtttgaatgaccacagtctgcccagaaagcactcggaccccctctaggatcaagagaactgaagctcagagaacagcacgtagctactggggagagggctggtgccaggcctgtgtgactcttgtctaggtggggaggccggacaggtgcacccttcctggcctccagggaaggggtaaccttggagcttgggtttgacagagaagcatgagaagttcagagagccccagggtggagaggaaggtgagtaaaggggcagggccggggcacaaaggacattgaaaggtatgcttgagaacggggtgggtgggagaagctgggagccacagatggttctacagtgtggaagaagtacagactaccgaagctgtggaagacgtaaggactactgaagctgccaacctgtcctggcatccacagttgcatccctggcaacgcgcactccacttatggggtggccactgtgtgtgacctggagctgggattaaaaccagcaacttgggtccaggcatagtggctcacacctgtaggaaccccagcactttgggtggctgaggatcgcttgaggccaggagttcaagaccagcctgagcaacagagcaagaccctgtctctacaagaaaaactttataataaaaacaaataaataaaactggccgtgcgcagtggctcacgcctgtaatctcagcactttgggaggtggaggtgggcggatcacttgaggtcgggagttcgagaccagcctggacaacatggtgaaaccccgtctctactaaaaatacaaaaatcagctgagcgtggtggctcacacttgtaatcccagctactcaggaggctgaggcaggagaactgcttgaaaccagaaggcggagtttgcagtgagcccagatcacgtcactgcactccagcctgggcgacagagcgaaactccgtctcataaataaataaataaaaccagcatcttgccccagaatcctctaccctaatggaggtgagacgtccgcacatcacagagaggggccgtcatctgcgcagggccacggcggcctgcaggacaagcaatcagggcccactctacccccgacccccactgtaccccagggcctgccttgctgacggccaccagcaagagcccagtaagtgggtgcagaacgcacaggccagaggtgggggctgagcctggtgcccacagactccatttcccatggacctgcccctagagaattcccaccctgaggccacaggtctagaagctctcagcctgacgctgattcctgccagctccccatgtggccatagcctcgctcaaaggcccttgggtgccaggacaagcgcgttcacaaagaacacagccacagcctccaccacctggaggctcaggctcgtgcctttggtcacttggtccccaggcctcggcttggacgcctgtctccacaggctcccagacactccgcacagggcagctgtcccgttctaggccctgggtatgggacatggaggccgggtggaaggcctcaatggggaggcagtaacaggatggtagggcgccctcctgccagggggtcccaccaagggcagccagcaggactgagacagaacccagtccctccccacccaccactccagagcatgcttcctggggccagcaccatgcctgaccctccgtgggtccccacatgagctggacaaatgaacgaccaaaagacaggaggctgtggtgccccacccacctggaccgagggaaagggcggaggggagggcgccctggtggtcccccgcctgaggccagggccatagatgaccttgcaatcccagccccccacacctttctctggcctggattcccgagggccccggggaggcagggacccccagcccaagtgtcctgcggccccaccaccagccccgccaaggccccaccccaagttctagaacctggctgatcactggcggtcagcggggacccaggagcggggaggggtggcgggaaggcaggagaaagttgagggaggcaggcgggcgggtggctaacggggtggtgggtgtgagctgggccaggcactgcccaccacccgcccgcccgccccgcagctcgggggccaatgagcagcggccggcctgatgtcaccctgcaaatctcagcctcgctctctaacaaagagaacaatggggcggccagagggaagctccgacgatgccaccgctggaccccacacccggggcctgccgcccgccggcctgcccagcaggctgcaccccagaagtggctttgacagccggtccttccccaggccccgaaatccctgactcggggccagagagtggagcagggaccctctcctgcccggtcccgtccccaccccagtcagggccccaggctggagactgagacgtgcgctctttgtactgtcagccttctctcccggtcctgcaggcggcccccctaagccacccctaaacctgcgcttgccccgccccgccgcctgtgctgggtgtggggcgccccccgcccggccggagccccgggccctcgagcccctctctggggtgcccctgcgggcggccgagggcctgggctgcggcgcggctccccggagcctttccgggctggaggcggcccagacaaaggcggcggcggggccggagcgcgcaggggaggagcgcgggctgcgcccaactttctcccgcggcggctgcaggacaaaggcgcaaaggcagcggccgaggccggagcccacgcggggcgtgtccggtgcggggcgtccggcgcgggctgggctgggctcgggcgacccccttccccggggcggacggtgcggggacccccaggacagcaacccccgacgagggccactcaccctggcgacccacgatctcggcgacgtgctcggagctgggcaccgggacgcactcggtcatgttgacgcttttcttgcggctgccgatcacgctcatctggtcggccagcagcgtcgggggccccagggccgcggggtggggcgcgaagcccgcgaacacgtcggggggcgacggccggggcggcggcggcggcgggggactcgcgttggggtccagcagcggcagcgacccgggggccacggcgggggccagggtcgggggcgcgccggcctcaggtccgtcggggggcacaggctccggagccgccccgccgtccgcgccccccgccgccgctgcgccgtccccggccgccccctcctcgtccgtgtcgccagcgccccccagcccgagcgccgacagctggtccagcgccaggcggagcgcggcggccgcgtcgtcgggttcgggcggcggccggggcgcgggcgcggcctcctgggcgccctcgggcgggggcgcaggtccgggtccggggtcctcccccgccgcccccacgccgccgccgccgccgcccccgcccccgccgccgtcgggctggccgagcgagctgggcatggcgggagctagcgctggggcccgcgctcctgccgcccgcgccgccgccgccgcccgcgccgccctccgcctctgcgagctgggccgccggccgcctgcatccagcggcgggggcgggcacggggggccgggcgggcggggcggcggcggcgcggggctgctcggggccgggccgggccgggccgggcggcggcagcgactctggctgcggctcggcggcggcggcgacggcggcggcggctcctcggcggccgaggcggcggcggcggcgcgggacgctccttccctcccgccgcctcccgcggccccgccccggccccgcccccgcgacgtcacgccgcggcccaacaatgggcggcccccagggcgcaggcgcgcggggcggggccggggcggggccggcgccgggcacgtggtccaggccccgcctccgcccggcgctcgggcgggaacccgggcgcatccgcacgtgcgggcgctgctgcaggtgtgtgcggctcagcccctgcctggacagcgctccctccccaagcctgagagtccctgcctcgcgcgccccagggcccgaggtcccgctccccaatttcccctagagatccgggtcgcccccaagcgaggtctcttgctccacgcccgcttccttgtgccagggacccccacctccctgcataaaggcgtggggtcctctccaagtccccctcgcgatcccactggacttcgaagtcaggctcctgcccgcccaccgcctctgtgccagggtccaacccccgccccacggtgcaccccccagggcctggggtcccagtccccaagtaccccttgctatcaggtgggctttagggtcaggcccctgccccacccccagcctctgtgccagggacagctccacaatcatgcacaccccagggcctgaggtccctctcccctagtctctcctagctcccctctggctggctcccggctttgggatcaggccacctcctccacgccacctcctccgccccacccaaggccacagacccggtctctgtgcccccagccagagacctctctaccacagtggtgcttccatggcgagggcaggctcacaccagccagaaccctccatgtggagccccaccctcttctggggtgcctttccccgcaacgggcgttgtccacctctaaagccacccttgccgggcgcggtggctcatgcctgtcatcccagcagtttgggaggccgaggcgggtggatcacgaggtcaggagttagagaccagcctggccaacatggtgaaacccccgactctactaaaaatacaaaaattagccaggcgtggtggcgcgcacctgtaatcccagctactcaggaagctgaggcaggataattgcttgaaccctggaggtggtggttgcagtgagtcgagattgcaccactgcactccagcctggttgacagagcaagactcctctcaaaaaaaaaaaaaaaaaaaaaaaatagccgctttcccagcggctcttcctccagctgtccttcggggccttccttgcacctgtggggttttttgtgataaacctgtctggctgggtctacctgcccccctcttctaccagacctgtccctggctggctgtgcaaacttggaccgaaggcagggctctctgggcaggagtggggcagcctgcccctttgcctagcaaggcttctcctctgtcccctccccccgcctcacacaccctgggtccccctcagccactcttctagtccctcagccacagccacccactgctgggcccttcacttttggtggcttctctgcccacttcttccaggcaggcagggtcaggatccccctgcctggagcccttccccacccaaaatctctctcctgaccccaggctgcatccagccccacttcccctcctggggtcctggacttctctttcgtgcacgcccatgcttggaattgtttttctatctctctttctttctctctttctttttttctctttctttcctttttttctttctttcttcctttctttcttttctttttctttctttctctttcctttctttctcttttttcttttccttttctttctttcctttttttctttctcttccttttcttttttctgtctttctttccttctttcttttctttcttctccttccttccttgcttccttccttttctttcatcctttatttcgttcttcatttcttcttttctctcccttccttccttccttccttctttctttctttttttttttttagacggagtctcgctctgtcacccaggttggagtgcagtggtgcagtcttggctcactgcaagctccgcctctgggttcacgccattctcctgtctcagcctcccgagtggctgggactacaggtgcctgacgccacacccagctaattttttgtattttttgtagagacagggtttcaccgtatcaaccaggattctcccttccttctctgctcccctcccctctcctctcctttccttttctttctttttcggacagagtcttgctctgttgcccaggctggggtgcagtggctattcacaggtgtgaccccaggacagatcagcatgagagctttgaccagctccgtctctgacttgggtaggttcagccctccttaggcaacctggtggtcctcccagtccagggaggtcatcatattaatgtagacgctggatcagcatagctcactacagctcagaactcccgagctcaagcaatcctcccgcctcagcctcctgagtagctgggaccacaggtgtgcaccaccacaccgggctactttttgtatttgtagagacagggtcctttttgttgcccgggctagtcttgaactcctaacctcaagcaatcctcctgcctcagcctcccaaactgctgggactacaggtgggtaacactatgcccagccacttgcaattattaatggcattgtcagccgggcgccgggcgcggtggctcacgcctgtcttcccagcactttggaagtccaaggcaggtagatcaccttaggttaggagttctatatcaacctggccaacacggtgaaaccctgtctctactaaaaatatgaaatgagccgggtgtggtggcgtgagcctgtagtgccagctgcttgggaggctgaggcaggagaatcgcttgaacccgggaggtggaggttgcagcaagttgagatcacaccactgcactccagcctgggcaacagagcaagactctgtctcaaaaacaaacaaacaaacaaagaaaaaaccctgtgtctaataaacaaatgaatttatgaatgaatgaagcaatgaatatttaattctttcccagttttggagcctcagagtcaaaactcaaggtgtgcgcagggccgcgcccccttcaaaggctctggggagcgtcctttctgcctcttccatcttctgggggctctgggcctcatcgctcattgtggcctcatcgctcattgtggcctcatcgctcattgtggccgcatcgctctgacctcggcctctgtcttcacacacccatgtctccctgtatgtgtcctggtttccctcttctcatgggaacaggagtcacgggatgagagtccaccccctcccgtacaactttggcttaacttgtctgcagagaccctctttccaaacaaggtcccattcagaagttgtggggttgaggacacagacatctttgtgcggacatgattcaacccataatatacctccttggttgtgacagcccagatgcccacaaacgtggcccctgggcccagagtcacctcaggtgggaagcgctggtgtaggtggtggcactattgtggtcaccgtgaaatgtgaaattctctcaggcccactctgcatctgatgttttttactttttcttttcttttcttttcttttttttttgagacggagtctagctctgttgcccaggctgcagtgcagtggcacaatcccagctcactgcaagctccgcctcctgggttaaagcgattctcctgcctcagcctcctgagtagctggaactacaggcatccgccaacaagtccagctaatttttgtatttttagtagagacggggtttcaccatgacggtcaggctggtcttgaactcgtgacctcaggtgatccgcccgccttggcctcccaaagtgctgggattacagccatgagccaccacgcccggccgcgtctgacattttttcatgggagaatgttggaagaaaatcacataggaagggaggcattttgaccgggcagggtgggggttatgggagacaagaggagccgtgatcatcgctgatgaagcccaggggtgggcctgggggatccattgtcttgcttaggatacagtttttttttgtttgttttgtgtttttgagaacggagtcttgctctgtcactcaggatggagtgcaatggcgccatcttggctcactgtaaactccgcctctcaggttcaagagatgctcctgcctcagcctcctgagtagctgggattacaggtgcccaccacgcctggctaatgttgtatttttagtagagaaggggtttctccgtgttggtcaggctagtctcaaactcccgaccccaggtgatcctcctgcctaggcctcccaaagtgttgggattacaggcgttagccaccgtgtctggcctatttattattattatttttttgaagacagaatcccttcactctgtcgcccaggctggagtgcagcggcgtgatctcagctcactgcaacctcttcctccctggctcaagggattctcctgcctcagcctcacgactagctgggactacaggcacctaccaccatgcccagctaattttcgtgctttctagtacgtgttggccacactggtctcaaactcctgacctcaagtgatctgtctgcctaggccctgcaaagtgctaagattacaggcgtgtcccaccttgcccagcctgtacaaaaaatttaaaaattagccgggtctgatggcacacacctatggtcccagctacttgggagtctaaagtgggaggattgcttgagcccgggaggcagaggttgcagtgagctgagattacgccactgcactccagcctaggtgacagagtgaaatcctgcttcaaaacaaagaaaaaaaaaaaaaaggccaggtgcagtggctcacgcttgtaatcccagcactttgaggggccaaggtgggggcagatcagtggatcacctgaggtcaggagttcgagactagcctggccaacatggcaaaaccccgtctctactaaaaatacaaaaaattagccgggcgtggtggcacatgcctgtaatcccagctacttgggaggctgagacagaattgcctgaactggggaggcagagattgcagtgagccaagatcgcaccattgcattccagcctggcgacaagagggaaaccccatctcaaaaaacaaaacaaaacaaaacaaaactcagaaaggaaaaggaaaatgcacagggagaatcctgtgatggagaaggaaggcaggcaggacagcagagacaggagcattttattgcttgtaaattacatctcaaaaaacccacttcacacacgttaactggaaatatcttcaaatgaacggccgtgagcgtggttattttggtaaccagagaaggctaaaaattaaaactgtgaaaattaaaactgagcagggaaggcagttttgtggtctcatattatttgccctcaacaaaattcttttgcccgtggccaacatggtgaaaccctgtctctactaaaagtacaaagattagctgggtgtggtggcgggcgcccgtaatctcagctactcagcaggctgaggctggagaatctattgaacccgggaggaggaggttgcggtgagccaagtttgcaccattgcactccagcctgggcaacaagagcgaaactccatgccgaagaagaagaagaaaaaaaagtacacaattctggtgaggcacggtggctcatgcctgtaatcccagcactttgggaggccgaggtgggggatcacttgaggtcaggagttcgtgaccagcctggctaacatggtgaaaccccgtctctactgggggtggtggcatatgcctgtaatctcagctacttgggaggctgaggagggagaatggcgtgaacccaggaggcagagcttgcagtgagcagagatcacaccattgcactccagcctgggtgacaagagtgagactccatctcaaaaaaaaaactgtggaacattatcattaacttttgtgggtgccctttagccatttcccccagtccccataatccccagtcactggcacccacgtgtccccttcctgtctctgaatcggcctgtcctggacattcacacaaatgggattgcacgccgtgtcggtgtctgtgtgtctcttgctgagggtggactcctccaggggcatctgcgccgtggccggtgtcagagcctggttcctgttcatggccgagtcctgctccatggtgtggccgggccgggctgtgttcgttcatccctggatgggcacttgacttgtttacactttttggaccccttgaatctggagcgagtgtgacagaatctcacaggcagtgcccagccacccgctaccagaaagctgagtcttgctccggtatggccctgtccgaaagaacgttccggaagctgggggtgttttccatgggcacctccgggctcctggagatttgctgtgacagccatgagggacacacacaggcgaggggcatccccggggatctttgcggtggcgagtgtgtgcggtggtcagaagggctgtccctgtctgcctgggtctgggggctgcagggacagcaaggcacgggccctgggtgtggcaggagaggcatgatgccccttagctggtgttgctgagactcgggagccctgtggtccgtgtggctgggccgagggctgggaggtgcatcctcgccacgggggtcctgagcctctcctccctggtaccctctgtggcggcagcggtggggagcttggtctgaggggaggcgggggacacgtgaggctcttgctgctgctggcaagtgccagaagggctgccatggtggttcacacctgtaatcccggcaatttgggaagctggggcgggcggatcacctgaggttaggagttccagaccagactggccaacatggtgaaaccctgtctctattaaaaatacaaaaattagctgggcgtggtggctactcgggaggctgaggcttgaacccagaaggtggaggttgcagtgagcccagatcacgccactgcactccagcctgtgcaacaagagcgaaagaagagcgaaactcttgtctaaaaaaaaaaaaagtcccagaaggtcttggggctgagacatgggcggggctgggggcagccaagtggcctttgaggatggggccaggcaccgcacagggcaggctggtcatgaggcccccacgaaagatcccagcattgggagctcaggcttccccgccccatgccaggtctgggttctggggctggagtgtggagcctcggtgcgcccagggggttcagcctgagggtctgagacttttccagggcagggaatttgacgagggcctgagcactgggctggcccctcaggtgcccacgcctacaactcacttctcaccgggcacgacctctagcaaaggccagtattgccttggcctgtgggggtccccaaggtttcagggagagaggaaaggaccctcaagcttcgtcaacagcgacagcccagggcctggatgggcttccagtggggagggccctgtggcaggggtagggatcatcacatctcagaccaaggccaggacatggccagaaccccgggatcagagggactgatcggggtctgtcagtgacaggaagctgggctgcgacagagagggagagacagcaagagacagagacagagaccgagggagagagacaggagagagagcaagaaacaaagagggacagagagggagacggcgcaagagagagacaagagggagagatagagacagggatagacagagacagagagagaccaagggagacagggacacagtgggagatgggaagagggaaacagagtgtctctgagtgccgggcagatgaggggagggtggcctcccagccttcaggtccagaaagcagcttccagtggccatggctagtgagctgaagtccagggtcccggggcacagctcccctccctgcagcggctgtgcaggacctgaggacctggggggccctccctgccaggcagcccctcctgcttcccttcctttggaaggagcggtgctgggtctgagccccagcccatcttcctcaccggggcagcagggccaagacccacgatccctaggctgagccagcggcacctcagggggcacggcccttgcccacagatgcccaggccggcctggtcttctctgaatacccctaagcctgactcttgggttgtgaatgtccgcgaggttgggggacctgctggccctgtccccacaccgctttcagcctttcatcacccaaccaaagacagaagctcaaacgtgggcaccaaagtctagcggacgcaccgaactccaggctccaagcacatccacccatggtggctttattcagtcacgtccccacgcccacggctccctccaccaggcagacagaggggaggccaccccactgcaaagggtcccagccagtgggcaccaacctcaggaagacgtggtccccacctggagcttccctcggctgccctggcccttgagcccgtcctgaggatttgtgctttgactctgacagggagcagcaggaagctgccagcccactgcctccatgcgggtccttggagggcagacggtggagcggcgcttcctcagctcccgcggtcaggccccatcagggatggtcacagtccagccacaggggcgactctgcccatcagtccccctggggcagcgaccagatcctggctggggcagcaccgggacaggccctctctatgggcctaaggtcaatgcaggtgggggctcgctgggcccaggccaatgaacccacccgtaggagccctcactgggcagcagggccaggagggcaccagggactggccgcagagtccactcggggcaggcgtctgtggcttggaacctgccctcgccaaggcactggggggttaaggagcagatccctcagacggccttgggccagaagctccctggagagctgggcacctcgaggagcgtctgggagcctcaccctgtcccagtggctcctggcacccctgggagcgtcagcaccaccccaaagctgggtgcctgtgtcgccactaaacagaagggaaaccgaggcaggggggccggctggcagtggagcattctggcagcgccgggcgaccaagtcccgactggcagcggctggagtttggttttcagaagcgaaggctggcgttggcacacagggaaggctgcccgatgacgtgcctcgactgtgttacatttactgaaggagagcggcctcctgggcatgccactcaggcacggtgaggctctgtggcaccaccagccgcatggcagggcagagagtggcgccgtcctgcatgccccccacagcagaccagagtcccgtcctcacgctgcacagtgggtgatgtgagtttcaaaactacgcctccagaccgagaaaccctcccagctgtcagcaagccgtggcgccgagctgccgggcacctgctggctgctctccagtctcaaggagctgggacagcgggcatggggaggagctggcctcgagcccaaaggtcgtagggagccaggcagggcccaggagcacccggcacttcccgaagccggactctgtagaggacgagcgtggagggtctttcgggtgggggcagccccagctgtgtgccccgaggccccgggaagtggggacgggccgaggagggagccaggagcacggccttcctcctgggtgtctccaaggctgggcttcgccgccgagcctggttcacgtggggccgaggaccgcgtctgcaggcggctccagcaggcagcacgggctctcggcagggcctctggaaaggacagggagggctggctttagcgactccacgggacggggacgcttgggctcttctagggagatgggaagctcttgggaggcacccgtcatcccaagcacatctgtgttcaccaggcagtccccactgccaggacccgactccagggagcccccgtggccccgcagcacctgccctagacgtgctccatctccgggtccgggtcgggctcctcctcctcctcctcctcgtcttcctcgtcgtcgtcctcagcgcaggccttgtccagcggcgcctccccgtcacgggccagctcctccacgtgcgccagcatgtcggccatcagcgcctcctccagccgcttccgcacctgctgcaccagctcttcctgcttcctggggacacatggaccttgcgttacaccaaggtgagcggccagcaggacatggacacaggatgaacgtggggacctcagctgggaggggaggcccgagggatccacaggcacccccccaggaccagccctggcccgtgccacccctcccttcacaatccacgcagagaatgaccggctgccgctggccatcgccagcgtccgccaccctcccagatggcccccctgccacctctactgggaccaagggaggggcctgacccttcagtccccagacttggccctgagcctccccggggctcagctgtgtaaacccttgctcctgtcccttgacaggcactgagtggggcaggaaaaccctcaccaggccaggtagaggctcatgcctgtaatcccagcactttgggaggccgaggtgggcagatcacttgaggtcaggcgttcgagaccagcctgaccaacatgacgaaaccccatctctactaaaaatataaaaattagctgggcgtggtggcggccgcctgtagtcccagctacttgggaggctgaggcaggagaatcacttgaacccgggaggcggaggttgcagtgggctgggatggcgccattgcactccagcatgggcaacagagccagattctgccaaaaaaaaaaaaaaaaaaaaaaaaaaaagcaagcctcaccaaaatcagctaccatcagcccgcagcagcccccaccctcgcaggccgggggtcacctttccgctgcccactatgcaccagcgtgtactcctttaccatggctcgggcggcctgagaaaaagaatccacaccctcgtctcaacccaccaccagggatggggggcctcctcctcggggcctacaagctgatgccaggcactccagggtggccgctcctctgcctgccgcctccggggccgcagcacgtgcttctgcccacctccctctccggctgcccaaagagcccgtctctgttctgctttcagtcccaggcaaagctgactttgtttctccccagttgtggccgaggctcagccgccccctgcctccggggtctctctccagcggctcctgcagacctgagctgctccctctcactctgtccccaccacccggaacaccctggctcacctactcgactgcagccaccacctgctcgtcatctttccagacaggaccctacctcctgcggaacccaccaccgagttcctcatttcaatgcccttttctatttctataagttcttattttatttttttaactctgtcacccaggttgaattgcagtggcaggatctcaactccgcctcccaggctccagtgattctcctgcctcagcctcccgagtacctgggactacaggcatgtgccaaaacacccagctaattattttatttttagtggagacggggtttcaccatgttggccaggctggtcttcaactcctgacctcaggtgatcctcccgcctcggcctcccaaagtgctgggattacaggcgtcagccactgtgcccggccttatttctgcaagttctgcagggcttttaatgatctgtctgctatttttcacagtcttgttcttttcttttgttgacaattcttcctatttcaccatcttcatttcgggaagttctctgagcgcgcagagagtgtaaatggacctcaaacccaaaagagggggcccagaggtaccacggccggaggaggatgccgccagccgctccggatggaacccttggcgcccacagtttgtgtgcttgtgggggtggcgtctcaggtccatctgttcaccctgtgtgggggcacagggtctcttcttgtgcccaggggcctttaaccccggctgctgccacaggaaacccgcatgcccagcgcctccctggccgttccgggtcttggctccttctttctggaaccgtcaagtttcctttccttcctctgacctaagccgtgtgctgcactgaacgtgaaaggtcccgtcttcgctccagcacttccagagtttcctgcaggcgcctccgtcaccaggcggccttgcgtccactctgcacactggaagtgggttcggccctgaggccccgcaggagggccgctcacccctgggctgctcagcctcacctgactgttgcctgtttctgagcggccgtgttccctgctgttcgttccgaggctctgcacatcagaactgcccctcagcaggcacccagagccatctccctgaaggcagagactcctggcctgccctgtccctccgtctccagggcccaacatggagcccagcacccagcatagccagtcctcacggactcaaaggaccacactcttttcaagaacattcctccaaggggtgcctggctcgccctgaacccaggacgcgggtgaaacggttcatactgctccgacgatgggtccccttgccctggctgtttctgtttcaaaaccccagcagcatcgtggggagacgggaagcacgcaggcacacggggacactcagggtccccacggccacaagagacagggtggagcagcaggggaccaggccaaggggctacctgatgtcctcgtcggtcaccatgaaggctttgcacaggggctgcgtggtgttgagccatacgccggggttcttctccacggcggccgagagctgtcccgtgatgggcatggtgctagtgtgcagggcgctggcgatggccgacagcagcgtctcatccgtgcagccaggtcccacccctgccaggcagtggacaaacagccgcaagtggagaggtcaccacggggcagctgtggcccagacaggccacggaaatgccccaagaatgggagctgccaccttcttggaaggaaccccaacttgggttccatttctaaattccctctcccgcttgtgttactacattcataacagaaaaaaaagcaagttaggccaggcgtggcgactcccgcctgtaatcccagcatcttgggagggcgaggtgggaggactgattgagcttaggagtttgagaccagcctggacaacacagtgagactcctgtctctacaaaataattcaaaaattagccaggtgtcacgctgcatacctgtggtcccagctactcaggaggctgtgctgagagaaccacttgagcccgggaggtagaggctgctgtgagtagtaacggcgccactgtacttcagcatgggccacggagaggctgccttttgtttttgagatggggtcttgctctgtatcttttttttttttttttgagacggagtctccctctgttgcccaggagagtgcagtggtgcgatctcggctcactgtaagctccgcctgccaggttcacgctattctcctgcctcagcctcccaagtagctgagactacaggcggccgccactacacccggctaattttttgtatttttagtagagacagggtttcaccatgttagccaggatgatctcgatctcctgacctcatgatccgcccgccttggcctcccagagtgttgggattacaggcgtgagccactgcacctggccttgctctgtattttctgtagagatggggtctcactatgttgtccaagctggtcttaaacttctgagatcaagtgaaactcctgccccagccccgccaagtgctgggattataggtgtgagccactgtacccagccgaccctgtctcaaaaaacaaccaccaaaaccatgcaagagctgcattctttgttctgtggtgtggacgtgctgggagagtacagaagcaaagtcagctgtccttgtttgtttatttaggatctccatggcaaaactgcacgtcctgcaggtgaaaacagccccaggcctgcgccacacctggaagccacaaagccccacccgcagggtctccaaggtcaagaatgaagggcccagcccaagcgcccttacccatccccaaccccactgggtcccctcctcctgccccagtcgctggcagatttgccctaagcacccaaagcaggaacagccatccaccctgccaggagatgagggcacctgcagcacctccaccccacccggcacatccccttccgcctcccctcagggtgcccgctcaccctgcaggcccttggggaggtccatggtcttgaccagctcctcagcaatgtcgaaggcgttcaggccgctcagcttcttctcccagaagagctgccccagacacatatgtgaacctcaagagtggccctgccctctccccactccaggtccttgctgggctccagggaggcccacctggcctccttgccccatgtgggtcccaatggggcatctcccctcccactgccttgggtctccagaccctgcccaggctttccacagccagggatccagtggacgtttgtaaataagaataaaaaatacacatggggtggctcacgcctgtaatcccagcactttaggaggccgaagtgggtggatcacctgaggtcaggagtttgagaccagcctggtcaacatggtgaaaccccttatctactaaaaatacaaaaaaaagtccggtgtggtgacgggcgcctgtaatcccagctacttgggaggctgaggcaggagaatcacttgaacccaggaagtggaggttgcagtgagctgagaccgcaccattgcactacagcctggacaacaagagcaaaactccatctcaaaaaagaaaaaaaaaaaaaaaaattagccgtgcattgtgacgggtacctgaaatcccagctacttgtgaggctgaggtggaaggatcacttgaacccagttgaaaccaggaggcagaggttgtagtgagttaagatcctgccactgcactccagcctgggtgacagagcgagactctgtcacaaaaaaaaaaaaaaaaaaaagaaaaaacaaaaagaaaatacacacggttctcaggtttttaagaagtaggttacacagtcacatatgggcagtcaaccccctgtatctgtgggttccataaccacacacccaaccagcggcagactgaaaatatttggggggaaaaaaaataaataaatacaacaactggccaggtgagttggctcacacctgtaatccccacagttttggaggccaaggtgggaggatcacttgaggccaggagcctgagaccagcctgggcaacatacagaaaccctgtctcgaaagtgaaaaacttaaaaaaatgaataaaacacacacaaggaacgtcacaagcatccacacctcatgagcaagctagaaaatacctgcaggtaacgtgcaaacattagaccatttccattttttaaaaatatttttattttatttttgagaccgggtctcgctctgtcgcccaggcaggagtgcagtggtgtcatctcggctcactgcaacctccacctcccgggttcaagtgattctcctgcctcagcctcccgggtagctgggattacaggcgcacaccaccacgcccagctaatttttgtatttttagtagagacggggtttcaccatgttgggtcagcctggtctcaaactcctgacctctcaggtgatccacctgcctcggcctcccaaagtgctgggattacaggcgtgagtcaccgcgtgaggccatactagaccattttctgaggggcctgaacatccccagattttggtatctgggggttgagggtggggcgtatcctggcaccaataccctgcacattccaagaggggaccgcaggactgggtcttgctctgcccccaggctggagtgcagtggtgtgatcatagctcactgcagcctcagcctcctgggctcaagcaatcctcccacctcagcctccccagaagctgggaccacaggcgggcgccaccacgtccagctaattttttacttgttttttgcctcgtcatgttgcccaggctagcctggaactcctgcgctcactacgtccgctccacgtacgacctcattccaaacgtccacccaccaaagtgaacaacccggccgggaaggctggggtcgctgtgcgttgagctcacctggcgcggctggtccaccgccttctgcgggtcgctcttgaccttgttgctggggtggttggtaatcttggtcaccggctgcttgaagatggacgccgtctggcgcacgggcagcgccgtgttcaggtcgggcttgccctgcgggaggaaggatatgcagtccggcctgggggcgccccggcggcgcggagcctcagggggtgcggggcccgggtgaccccctgctttgccggcgcccctcgtgtcccccgcgcccgccaggacccccacggtccggggaggccgctcccgcagggtcggtccggccggctctggaacgcccgccgcgggccgcgtcctcgccatgcgccttgcgctctgcaccctgtggcctgcgccttccgctctgtgccctccgcccgctgtgacctcctgcgctcaggacgccgggctgtgtcgcctgcagctcacgtcatggccgcgtccccgcctagaacgccccgcgccgacgtcacctgcgtgacgccaccactcaccttgacctggttggaggagtcgtagcgcacgcgctggcggctcttgttcatcttgctcatcagcatcttgcccgtgcggaagtcgaaggtgctcaggtccatggagccgcccaggtagcgcgccagctgcggcttgctgcggaacttcttcccgctcgggctgcggggaggcgggacggtcggcgccccgggcggaccccagaccccaaacccaggcctcggccgcagacccaaacccagtcccagccccagcttcaggtcgcgaccccagccccagaccccaacacggccctgaccccaaacccaggcaggccctggccccagccccagaccccaaccctggcgtgaccccagaccttcatcccagaccccagcaccccacaactggcccctagatctgggcgccagccagacccagagcactggccccgatcctcacaccctggccctagccccagcctccacatcggatccttgctccagacccccaaccccggtcccctctgaatcctccccaccgtaggccctggcagcgtcaggcacagcagacgctgagttcgggtacaaacgctactacctacagggctttgggccccggctctgggaggatggctcacatgtccagaacattccagacatggaatttaggtcacattcttgagaaaagaccccacggagaacaggtatgtgagggacagccctaaaagcaatcttcttccaccttggggttacagcagcagggccagactgggaaggggtctcgttctaagatctggggccaggccctaacagctgcttgggcataacccgactggagagctcgcaacaaggcagccaggtaaacacagacctgctctcagacacggggctctgctctcagcctgccatggacaagcgccggcaactcatcctctccaggacataaggacacccaccaatgggttgccctgtgtgtcacatgaggtcacactacaggatgacaagcacccaacccaacacaccgtcatcatggttgggatgtaagatggaacagccatgttggaaaagcctgacagctcttcactgagtttccagatgacccggccacgccactcttaggtatctgcccgaaaaatgagcacgcatccacaccatcacttctacacggatgtccccaggagccagaaggtggaagcagcccagacgccttcaatggatgaacggacaaacgcccatccacacgatgggacatactcagccatgaaaaggagcgaggctctgacacaggccacagcgtggatgcaccttgaggacgccacattcagtgagagacgccagacacaaaaggccacacagtgtgtgatcccatttctaagaaatgtctagaacaggataattcagagacaggaaggggacgcgtagtgccagaggctggggtgcaggatgtggagtggctgctgatagggacaggacttcgtttctctctttccttttggagatagggtctcactcttgcccaggctggaatgcaatggctcaatcacagctcactgcaaccttgaactcctgggctagggtgatccttccaccttagtctcccaagtagctaggacgacaggcacaagccaccacgcctaatttttttttttttgagatggagtctcactctgtcgcccaggctggagtgaagtggctcgatcttggctctctgcaacctccacctcccaggttcaagtgattctcctgcctgagcctcctgagtagctgggagtacaggtgcccgccaccacacctggctgatttttgtatttttagtagagaccaggtttcactgtgttggccaggctggtcacgaactcctgacctcaggtgatctgtccgcctcagcctcccaaagtgctgggattacaggtgtgagtcaccgtgcccggcctaattttttttttttttaagacggagtctcgctctgtcacccaggctagagtgcagtggtgcgatcttggctcactgcaacctccgacttccgggttcacaccattctcctgactcagcctcccgagtagctgggactacagctgcccaccaccacgcccggctaattttttatatttttagtagaggtggggtttcacagtgttagccaggatggtcgcgacctcctgacctcatgatctggctgccttggcctcccaaagtgctgggattacaggcgtgagccaccgcgcccagccaatttttatatttttttaatagagatagggtctcaccatgttacccaggctggtctggaactcctgagctcaagcagtcctcccatcttccctcccaaagctttgggattaaaggtgagtcatcacgccctgctgcttcatttcttttttttttcatttttacttttagatccagggtctccttgtgtcgcccaggctggagtgcagtggtgtgatcacagcacactgcagccttgacctcctggactcaagggattgtcctgccttggcctcctgaggagctaggactacacgtgtgcaccaccatgcccagctaatttttaaattttttgcatagatggggactcgctatgttgcccaggttggtctccaacttacgatctcaagagatcctcctgcctcgacctcccaaagggattataggcggcagccactatgcctggctggtgtcttttatcttgataaaatcatttagaaataatagcacttgtatggtgcttactaggccaggtacctcaaacatattatgtctacaaactcagtcaacagtcacttttattaataatgcatcagcctgagattggtgggtagctctgttttgctgttttcccgttttcccagaatcctctagggcagtctcctcctgtcctcttctgcccctgccccagacgtcctggcccatggcagatgccagatgtcagacaactgagacagctcagaagaatctcccatagccagaaggaaactcaattctgcaggcactgcacagaaatgcttggtcccatgcttagctcaatcgcctctatccaggatctatgtactgggccgatacatagatcacaggaagttttatttctctccacccctgccccccaaccccgggcaaattccatggtccacaaggacacgggcaggctccagcatgtccagtaggacaggacgcctcagggagggcacgaggacaagtgcctgggggtctgaaaccactgagggctcttcccggagatttacttttgagacttaactcttttaattactctctggactggctgacgttcagtcgaagctggtttgcccagggcagtggaaagaaaccaagaaaccagaggctgagactcaggcttcatgtagccacaaggaaggaagaagagaccccacaaaacactcccaacagctctttgcctccggtcaccccaaagagaggccgttctgccttttaagatgaagggaaacaaggccgggcgcggtggctcacgcctgtaatcacagcactttgggaggctgaggtgggtggattgcctgagctcaggagttcgagaccagcctgggcaacatggtgaaacccgtttctactaaaatacaaaaaattggccgggcacagtggcacgtgcctatagtcccagctactcgggaggctgacgcagaattgggttgaacccaggaggcagaggttgcagtgagccgagatcatgacactgcactccagcctgggcgacagagcaagactgtgtctccaaaaaaaaaaaaaaaaaaaaaaggtgtaaggcgaacaagagacacacacagaccacagcctggttgttaagactgggggtgggcgcacaaggcagtggtaaatgggcctggggttctttctagggtgatggaaattctaaaattgaatctgaggatagctgcctatatccgtaaatatgtgaatatgctgaaaaaccattgactcgtgcactttaaatgactgtattgtatggtacataaaactgtatctcgataacaccttctcaaaaagaataaatgcagtggctcacacctgtaatcccagcactttgggaagcaaaggagggccaatcacctgagatcaggagttcgagaccagcctgaccaacatggtgaaaccccatctcgactaaaaatacaaaagtagccgggcgtggtggcacatgcctgtaatcccagctagctgggaggccgaggcaggagaattgcttgaactcaggaggtggaggtcgcagtgagcccagattgcagcattgcactgcaacattgcactctagcctgggcaacaagaacgaaactcggtctcaaaaaaaaaaaaaaaaaaaaaaaagaaggcaggcgcagtggctttcatctgtaatcccagcactttgggaggccaaggagggcagatcacctgaggtcaggagttcaagaccagcctggccaacatggtgaaaccccgtctctattaaaaatataaaaattagctgggggttgtggtgggggcctgtaatcccagctactcaggagtctgaggcaggagaatcgcttgaactcaggaggtggaggctgcagtcagccgagattgcaccactgcattccaccctgggtgacaaagcgggactacttctcaaaataaataaataataatgaacataaaaaattagctgggcatggtggcacatgcctgtagtcccagctatgctggaggcttaggaggcaggatcgcttgagcccaggaggtcaaggaatgcagtgagctgtgactgcaccactgcactccagcctgggtgacagaacaagaccctgtctcacaatgaataaatgaatgaatgaatgcaaatgcaagatagagggggttagtggttaccaggggctgggggagtaacaagtggggagtgactgctaatgaggacagagctgcttttcagggtgatgagaatgttctggaattagatagcggtgatggttgcacaactttgtcaatgtactaaaaaccactgggggccgggtgtggtggctcaggcctgtaatcccagcactttgggaggctgaggtgctggggtcaggagttcgagaccagtctggccaacatggcgaaaccccttctctactaaaaatacaaaaattagccgggcatggtggcagacgcctgtaatcccagctactcgggaggctgaggcagaagaatcgcttgaacccgggaggtggaggttgcagtgggctgggattgcgtcactgcactgtggcctgggccaagagtgaaactccatctccaaaaaaaaaccccactgaattgtacatttctaaaaagtggctttggccaggcagtggctcatgcctgtaatcccagcactttgggaggctgaggcgggttaactgcttgagtccaggaattcgagaccagtctagtctaggcaacacagcaaaaccccatctctataaaaataagccaggtatggtggcacgtgcctgtaattcccactacttgggaggctgagctgagagggtcgcctgagcctgggaggtcaagaatgcgtaagccgtgattgtaccactgcactccagcctgggtgagaccctgtctcaaagaaaaaaaacaaaaaaggtagcttttgtggaatgtgaattatatctcaattttaaataaaggttatgcccatctattgacacaaaatgatgtccctgagattttattcaatgaaaaaagaacagccttgataaaaccacacgtatagaaaaaagtgggcaacatggcctgaactctccccaggcacccccaacagaaaacgcagtctgggagcctgcagcctcagatgaagggctgggttgaggccccagacctgcagagggcggctctgggctgcctggcttcaccctctgcagagaaacctgaaatctctagcctgtagaggagcttctccctgcttttctccactgctagaccctcatgctcagggccagggcccagagtgggaatgagagaggtggggtgatgacagcctcaggatactccgctcaagctggccttggttctagctcccaagctgcagccacctcttagggggttcctgctgcctggacgcctctccctgtcactcaatgtcacgtcctcagagaagccctccctgaccccagtctcattcaggccccgtcatctgccctcccagatttcagcatgtgtcactgcagatctcaggacgtgtacagggttccagctcataagggtacacatttggggaccaagtttcccctctcttgctgtcctccaactttccaggaaccagtccctgagctcctcctgcaggacgaggccccacacattgcttctgatcacagccatcctttccccgctcacttttctcactttatctccccaaaccgggacagtcaagaaccacagaggaccgaagtgcacagtggacggagcggtcgttctgcccctccttggctcgtggaaaccacccgccctcacctgggcggtctcctgcccacgaccccgagctgtgggaaaaagggggaccagccgcacacccccctttacccaggtgctcggcacatggcaggcgtcctccgctttcccctcctgggggacctgaaggcgccacgggacactgaaccaaggggagggcgcaatcaaagctggcccagaatcaaaagcatctttcccgagccaggaaaaaaaaaaaaaagaggacaaacagcaggtggccgactgtctgggacttggctgcagcaggcgactaagtctttgttccacggagggggttccctgcgacctttcagagcagcgccttgttccaatttggggacgggggggtctctgaaagccttccaccaccagtaacatccacgcaaagactaccgttaggtgggctcggaaagtcgaaagcctcaggtctccaccctgagggggccacgacccaagaggaccagaggcctcggaaggagtcaaggggaatacctttaaaaaaagcaacgctgcgtgggagaccagtcaccctgaggcgcttattcccaggactggggcgagcccaagaacccgtattttcacgcacgccctccccgatccgcccatgagccctgctccccgaaatcccggctggccaccccctcgggctccgcgccaccccaggagcgccccaagaaggcaccccctgcgtctcacgggaaccaaagggacagcccaccctccacccctgccccccggtagcatctggccgccgccaggcgcccctggcccagcgcgcacgaacaaaggccgcagtcgccgtccggcagccagtccctgaacggccggccgaaagccatgcggcccaacaagcggcgcacgcgcactgggcctccgcgcgccgggcgcacacgcacgcaagacgcacgcacgcacgcacgacgcacgcgcggggcccaggccgcggcccggggcaggggcgccgaggccgccgcagaggccgctgggaggagcccgttgaggccctgcgcggccggcgcgctcattcacctatagtaaaagacatccctgtggccggccgacagccccgaccttctgggcacttcttccctctcccagccctgcgggagcgccgggcactcccacctcttccgctccattgcgcccggctcctcggcccgccgccgggcccgccgccgccgcccggacccccactcgccgccgccgcctcagctgcctccgctgccgctgccgccgccgccacttgccgcggctgttccggcccgcgggcccccgccctccgcccccagccgggcgcgcgccggctttgccgccctttcggccccctccccgcgctcgccagcccccgctcggggggcccgctccgcccacccgcccgcgcggggccccgcgctgcgcagccgcggcgccatgcccccgcccctctacggccccgccaatcagcgcgctgggagggggcggggccttaagtggcgtgcgcgcctgcgcgctgtgccttgcgagctgccagtgcccagcagctgtgcccggagtccgcgcggctccttttactgtgccctgtctctgccggccgcctggtgcgcgtgcgcggggacatgctttcggactagtggggtcctttcctccgacctttctccagcccaagtcttggggactctggcccagtgactggacctcgacttccccgccctcctggtctcccagcttccgagctttttacgagcgtccaaatctgggggacttcccccgtgaccaccccttccacgcccccaagttccctccagtagcttttttttttttgagacggggtctctgtcacccaggctggagtgcagaggcgcgatcttggctcactgtagcctccgcctcccgggttcaagttgttatgcctcagcctcccaagtagctggttccacggacggctaatttttgtagttttagtagagacgggatttcaccatgttggccaggctggactcgaactccttacttcaggtgatcagcccacttcggcctcccaaagcgctgggattacaggcgtgagccactgcgccccgtccagctgctttttgaaccctcaaaatccaggaatctgagcacccccccccagctccccgaccaccccctgcaccttagtccagccaccatctctggccgggagagttccaggaccttcctgcggaatcgcccaccccctgttgtctccccttaaccccttccccagccagccagagggatcctgaaatggaaacgggtgggctgccccccatcagttccccctgacagcgtcgctcccaaggctagggctgggcgggcctgcacaggtgttcaaggactgagtctagctgctgtgctcccctgcctccagctggagaaactgtcctggttctaaggactcttttgttgacattgggtccacccgatctgggatgctttcccatctgaagatctcgtcccattttcaaagtccctttagctgcaggttccagggagtaggacaggcacattcatttattgattgattgactgactgatggagacagagtcttgctctgttgcccaggctcgagtgcaatggcgtgatctcggctcactgcaacctccacctcccgggttcaagtaattctcctgcctcagcctcccaagtagctgggactacaggcgcccaccaccatgcccggctaatttttttgaatttttagaagagatgggatttgaccttgttggccagctggtttcgaactcctgacctcaagtgatccgcccacctcggcctccctaagtgctggggttccaggtgtgagccacagcggccgacggaacgggcacattttcgggatgttgtgctgaccacagaagcactgaataaatcaggatggatgggtggatgatggtcggatgccccgctcaccccacctcgtcgtgaggtgaggtgaggtgtgagacagccagctctgtctcccgagaagctcaggagctggttactggcctgagaccgaggccccatggcattgggctgccatggaagaatcagtgctcccaaggagacaggaaagtctatgctgtggactcaaagccaggcagttacaccccagaaccagccgtggtacctgactagggcagccagagcaaggcctgcccccatgcaagggagatgataattatgttttgagacagggtttcactttgttgcctaggctggagtgcagtggcgtgatcttggctcactgtaacctcctgagctcaagcaatgtgcctgcctcagcctcccaaagtgctgggatcacaggcgccagccaccacgcccggctgggagattattattatttttttaatttaattatttgtgttttttttgagacggagtttcgctcttgttgctcaggctggagtgcagcggcgcgatctcggctcactgcagcctccgcctcccgagttcaagcgattctcctgcctcagccttccaagtagctgggattacttgactagggcagccagtgcaaggcctgcccccatgcaagggagatgattattatggtggcacccgccaccatgcccggctaattttgtatttttagtggagacggggtttctccatgttggtcaggctggtctcaaactcccgacctcaggtgatccgcctgccttggcctcccagagtcctgggattataggcgtgagccaccgcgcccggccaagattatttttaaaattgggctatgattgtgacaatgcactccagcctgggtggtagagcgagaccttgtctaaaataagtaagtcaataaaatagtctttaaaatggccaattccaggctgggcgcagtggctgcataccagtgtgaatgtattaaagcactgcattgcacacctgaaaatggttaattttatgttatgtgaatttcacctcaataacaaaaaaagtgacccgggacatatcatgtgcacacaggagcccatttggaaggggtcacgatggccaaacagagaggacaacttgagcaacaaaattaaagtttataaaggatttatagtctgtagaaaaaatgtcatcaaggccgggtgtggtggctcatgcctgtaatcccagcactttgggaggccaaggcgggtggatcatgaggtcaggagatagagaccatcctggctaacacggtgaaaccccgtgtctactaaaaaatacaaaaaattagctgggcttggtggcgggcgcctgtagtcccagctactcgggaggctgaggcaggagaatcgcttgaacctgggaggcagaggttgcagtgagctgagatcgcgccactgcactccagcctgggcgacagatcgagactctgtctcaaaaaaaaaaaaaaggaaaaagaaaaaatgtcctcgagtggatgctggtagaaataaatgactgaataaatggctgatgggaccacgagactgctcctctttacagtggagtccagtgactcactgtggcaacaaacacaggaccccatccgccagtctggctcctgtcacctcctgggctggcgagggcctcagtgccaccatgctgaagtctctgccttccctttcgggacttaagtaccaggacagcagatacagaaataggcaggggaagctcactgctactggggtctggtaacctacagattcagggctcaagtcacacaatttcttttttgagacagggtctcactctgccacccagtctggagtgcagtggcacaatcacggctcaccacagcctcaaacttctgggctccagcaatcctctcactgtggcctcccaaagtactgggattacaggtgtgggccactacacttagcctgcagacaatttttttttttaaatttttatatattttttgagacagagtctggctctgtcacccagactggagtgcagtggtgcgtgagccaccacgcacagacccctggccaatgtttttttaaaaatcagaacaaaatctggccgggcacagtggctcccgcctgtaatcccagcactttgggaggctgaggtgggcagatcacctgaggtcatttcaagactagcctggccaacatggcaaaaccccatctctactaaaaatacaaaaattagcagggcgtggtggcaggcacctgtaatcccagctactcgggaggctgaggcagaagaatcgcttgaaccctgaaggcagaggttgcagtgagccaagatcatgccactgcactccaacctgggtgacacagtaagattccatctccaaaaataaataaataaataggcttggtgcagtggctcacagctgttaatcccagcactttgggaggctgaggcaggagaatcgcttgaacccaggaggcggaggttgcagtgagccaagagcgtgccacggcactccagcctgggcgatagagcaagactgtcttttaaaaaagaataagtaaaataaatttctgttggttgagccatgcaaaatctgtggtattttgttatggcagccctagcagactgatataatagctatttccatcaacacacttatgtatgcagacagtatgtctaggatttttttttttttttgagtctcactctgttgcccaagctagagtgcagtggtgcaatgtcggctcagagattggcaagagctggaaaaaactgggcagctgtatcagggagtgtgactttgtaccatattctctttttatacctgttcatttttattttttcattttttttctttttatcagagacaggggcctctttgttgcccaggttagtactgaactcctggttcaagtgatgccccttcctcagcctcccaaagtgttgggattgtaggctgagccaccactcccagcctgttcatttttgtatccctaatgtgacagtttgaaatgtctaccaattctgatattcttcccttcaaaacacagaacctcattctcctccctctgcacgtgggctgggcctggggggcttgcttttgataaacaggctgtggcggaagtgatcacgtgagacttctcagggtggctcatagaagcactgtggcttgctccttcctctcccttggttcacctgctctggggaaggcagaggccatgccgtgaggatgctcaagcagcttcgtgtaggggcccccatgggaaggaactgtggctgtcaccgacagccacgtgagggcactggcttggaagtggctccagccccagttgagccttcctcagacgaagtggccttggctgatgtcttaactgcaacctcatgagagactctgggccacaaccacccagatacatcactcccaaatccccgactgacacagactgtgagagagtgaatgttcgttgctttaagccactacgtgtgggtgacttgttaaggcagcaacggatgaacacactgcagatactacttatgagccatttcaaataggcagtttctgtcagccattggaacactctcctagacttgcaacattctggagctgaaaggacgcctgggtcacctgtgccactccagctacagtcacagtaaccaagccaccagcatgatcaacatccgggcacggagcaggtttcagtgaggtttaatgcaacgtgcattaaaatatccaagctgttttcagaaacataagaagcctgaagctgagctgtgggtttcctcttgtccatcctgaggcttgggctgctccagatgcagcaggtgctgaggtgggaggagctagcaccaccaggcacctggagggagagcagacgaggcagggtgagtagaagtgtcccttccaggctgggtgcagtggctcacgcctctaatcccagcactttgggaggccgaggcgggcgcatcacctgaggtcaggagtttgagaccagcttgattaacatggagaaaccccatctctgctaaaaatacagaattagcctggtgtggtggcagatgcctgtaatcccagctccttgggaggctgaggcaggagaatcgcttgaacccgggaggtggaggttgcagtgcgccaagatcgcgtcattgcgctccagcctgggcaacaagagccaaactctgtctcaaaaaaaaaaaaaaaaattagctgcgtgtagtggtgggcacctgtagtcccagctacttgggaggctgaggcacaagaatcgcttgaacctggaaggcagagggtgcagtgagctgagatcgcgccaccgtattccagtctggcaacagagcgagactccgtctcaaaaaaaaagaaacgtcccttccatatgaagctggctgcggaagtggcccaggacagcagcctggcaggaacaccaatgcagcacaggccccgggctccacgcagtagggagaaacacagaccggagcagggctctgaggcccaggttcaaacagtggcatggcctcaggcctcaggccagcacctggaaaatgggggtgtaagagcacggccacgtgggactgtcatgtgggcactgggaagatgccacaggcactgtggttaagggggcagctggcatgctggagaaacacgtggatgcgtccagggcctcacaggcgcttccaagagctcatggggtgtccagccactgtgggccagcctccaccttccccctctgtctgtaacatgggccccacccagttcaggctgcagtgcccactgagacggaagcaaggtttgcctcaaagactcactgggattgtccagagggagggcgaggcccacaccccaatcacacaacccaaggctgcggggcggacagttctgtgcccgtgggccggagatgccagaaggggcacccagggccccactctcgaatgcaggtctctccagggggagcagtgagggctgccgccccggctctgggagcctggagaacccactcttcggccaccatccggccatcatgcagtccacccaccgcagcccactgaaacttaccagagcagtctgtgaagggtttgtgtaattaattatccttcttaaacttgccattgatgtaaggtacccagtccaggatcagccgccaatcggtggcccacaccagccccacggcgcccacagcgccccatgtgtaggccgtcgggaccctgcgagaggagaggggatggtcaggcctgctctggaccctttctccaagaccctctcctgcccaccccggccccccgtcctgagcggtgatggctgaggtgcgggcctggcacctgtgcccgcccagtgctgtgagccctgagggctggcaccagcagcacaggccctgcccatgctgccggctctcaggaagccagtaactgctcaaggggctgctggggtgggagtggagctggggggaggctgggcctggcgcatgtgtaggtgtttgtaagtttgcaaccaccatgatgatgggtccggtctgctgcagtctgcagaaattcatccatccctgccacagctgcaggactcaggcaggtgccgccatcacagtccctgttcccaggcgaggacaccaaacaacagacagggcgaggccctcacctgaggccacacagctggcgaggatcgaggcctccggttccaagctcatgctcttgcccaccacggcacgtgctgtgagagctcccctgagttgcctgggcccagcagattctaggaaggcccagcagattctaggaaggcccagcagattctaggaaggcccagcaaacccgcctgctggcgtttacgccctcgcacagtatgaacttgggcacaggcttctttttttttttttttttttttttgagacggagtcttgctctgtcaccaagctggagtgcagtggcgtgatctcggctcactgcaatctccacctcccgggttcaagcaattctcctgcctcagcctcccgagtagctgggactacaggcgcccgtcactgcgcctggctaattttttgcatttttagtagagatggggtttcaccgtgttagccaggatggtctcaatctcctgacctcgtgatccgcccgcctcggcctcccaaagtgctgggattacaggcgtgagccaccgcgcccggccgggcacaggcttctaatgagtagaacgcagcatgagcaatggggcatcactgccgaggtcaagtgacaaaagactggcttcagacatggaggctcacaaggggaatcccagcactttgggaggttgaggcaggaggctcacttgagcctaggagtttgagaccagcctagacaacagagtgagaccccatctctacacaaaattaagaaaaattagccgggtgtggtggcacatgccagtagtctcagctactaggaaagctggggcaggaggatctcttgagcccaggaagcagaggctgtggctacaccaactgccttccagcctcggtaaatatgagaccatatctcaaaaaaaattaaaaaagaaaaagaggctgggcgtggtggctcacgcctgtaatcccagcactttgagaggctgaggcgggcagatcacctgaggtcaggagttcaagaccagcctgggaaacatggtgaaaccccatctctactaaaaatacaaaaattagccgggcatggtggtgggtgcctgtaatcccagctacttgggaggctgaggcgggagaatggcttgaacccaggaggtggaggttgcagtgagccaagattgcaccattgctctctagcctgggtgacaaagtgagactccgtctcaaaaaaaagaaaaagactggcttccatcctgggcacctttgtgcaacctctagctgcctctggagaagccagctgccatgctgtgagatgccctatgaagggacccatgtggcagagaactgacggcagcctccagctaagaaggaaatgagggccgggcatggtggctcacgcctgtaatcccagcactttgggagggtgaggtgggcggatcatgaggtcaggagatagggaccatcctggctaacatggtaaaaccccattctactaaaaatataaaaaattagccaggcaaggtggcgggcgcctgtagtcccagctacttgggaggctgaggcaggagaatggcatgaacccgggaggcggagcttgcagtgagcttagatcatgccattgtactccagcctggtgacagagcgagacaccgtctcaaaaaaaaaaaaaaaaaggaagaaataaatgaatccagccaacaaccccgtgagtgatcgtggaaacggatc

SEQ ID NO: 590 - DNA, 3091 bp, Homo sapiens
attaccaatcgcgaaaccgcgactttggtggaggtagttctttggcagcgggcatggcgggtaccgtggtgctggacgatgtggagctgcgggaggctcagagagattacctggacttcctggacgacgaggaagaccagggaatttatcagagcaaagttcgggagctgatcagtgacaaccaataccggctgattgtcaatgtgaatgacctgcgcaggaaaaacgagaagagggctaaccggcttctgaacaatgcctttgaggagctggttgccttccagcgggccttaaaggattttgtggcctccattgatgctacctatgccaagcagtatgaggagttctacgtaggactggaaggcagctttggctccaagcacgtctccccgcggactcttacctcctgcttcctcagctgtgtggtctgtgtggagggcattgtcactaaatgttctctagttcgtcccaaagtcgtccgcagtgtccactactgtcctgctactaagaagaccatagagcgacgttattctgatctcaccaccctggtggcctttccctccagctctgtctatcctaccaaggatgaggagaacaatccccttgagacagaatatggcctttctgtctacaaggatcaccagaccatcaccatccaggagatgccggagaaggccccagccggccagctcccccgctctgtggacgtcattctggatgatgacttggtggataaagcgaagcctggtgaccgggttcaggtggtgggaacctaccgttgccttcctggaaagaagggaggctacacctctgggaccttcaggactgtcctgattgcctgtaatgttaagcagatgagcaaggatgctcagccctctttctctgctgaggatatagccaagatcaagaagttcagtaaaacccgatccaaggatatctttgaccagctggccaagtcattggccccaagtatccatgggcatgactatgtcaagaaagcaatcctctgcttgctcttgggaggggtggaacgagacctagaaaatggcagccacatccgtggggacatcaatattcttctaataggagacccatccgttgccaagtctcagcttctgcggtatgtgctttgcactgcaccccgagctatccccaccactggccggggctcctctggagtgggtctgacggctgctgtcaccacagaccaggaaacaggagagcgccgtctggaagcaggggccatggtcctggctgaccgaggcgtggtttgcattgatgaatttgacaaaatgtctgacatggatcgcacagccatccatgaagtgatggagcagggtcgagtgaccattgccaaggctggcatccatgctcggctgaatgcccgctgcagtgttttggcagctgccaaccctgtctacggcaggtatgaccagtataagactccaatggagaacattgggctacaggactcactgctgtcacgatttgacttgctcttcatcatgctggatcagatggatcctgagcaggatcgggagatctcagaccatgtccttcggatgcaccgttacagagcacctggggagcaggatggcgatgctatgcccttgggtagtgctgtggatatcctggccacagatgatcccaactttagccaggaagatcagcaggacacccagatttatgagaagcatgacaaccttctacatgggaccaagaagaaaaaggagaagatggtgagtgcagcattcatgaagaagtacatccatgtggccaaaatcatcaagcctgtcctgacacaggagtcggccacctacattgcagaagagtattcacgcctgcgcagccaggatagcatgagctcagacaccgccaggacatctccagttacagcccgaacactggaaactctgattcgactggccacagcccatgcgaaggcccgcatgagcaagactgtggacctgcaggatgcagaggaagctgtggagttggtccagtatgcttactttaagaaggttctggagaaggagaagaaacgtaagaagcgaagtgaggatgaatcagagacagaagattgaagaggagaaaagccaagaggaccaggagcagaagaggaagagaaggaagactcgccagccagatgccaaagatggggattcatacgacccctatgacttcagtgacacagaggaggaaatgcctcaagtacacactccaaagacggcagactcacaggagaccaaggaatcccagaaagtggagttgagtgaatccaggttgaaggcattcaaggtggccctcttggatgtgttccgggaagctcatgcgcagtcaatcggcatgaatcgcctcacagaatccatcaaccgggacagcaaagagcccttctcttcagttgagatccaggctgctctgagcaagatgcaggatgacaatcaggtcatggtgtctgagggcatcatcttcctcatctgaggaggcctcgtctctgaacttgggttgtgccgagagagtttgttctgtgtttcccaccctctccctgacccaagtctttgcctctactcccttaacagtgttgaattcaactgaaggcgaggaatgttggtgatgaagctgagttcaggactcggtggaccctttgggaatgggtcatgaaagctgccatggggtgaggaaagaggagacagtgggagaggacaatgactattgcatcttcattgcaaaagcactggctcatccgccctacttcccatcccacacaaacccaattgtaaataacatatgacttctgagtacttttgggggcacaactgttttctgtttgctgtttttttgttttgttttttttctccagagcactttggtctagactaggctttgggtggttccaattggtggagagaagctctgaggcacgtcatgcaggtcaagaaagctttctttgcagtagcaccagttaaggtgaatatgtattgtatcacaaaacaaacccaatatccagatgaatatccgagatgttgaataaacttagccatttcgtacacatggaaaagaaaaaaaaaaaaaaaaaaaaaaaaaaaaaaaa

SEQ ID NO: 591 - DNA, 2144 bp, Homo sapiens
ccgccgccgccggcccggacatggccgccaacatgtacagggtcggagactacgtctactttgagaactcctccagcaacccatacctgatccggagaatcgaggagctcaacaagacggccaatgggaacgtggaggccaaagtggtgtgcttctaccggaggcgggacatctccagcaccctcatcgccctggccgacaagcacgcaaccctgtcagtctgctataaggccggaccgggggcggacaacggcgaggaaggggaaatagaagaggaaatggagaatccggaaatggtggacctgcccgagaaactaaagcaccagctgcggcatcgggagctgttcctctcccggcagctggagtctctgcccgccacgcacatcaggggcaagtgcagcgtcaccctgctcaacgagaccgagtcgctcaagtcctacctggagcgggaggatttcttcttctattctctagtctacgacccacagcagaagaccctgctggcagataaaggagagattcgagtaggaaaccggtaccaggcagacatcaccgacttgttaaaagaaggcgaggaggatggccgagaccagtccaggttggagacccaggtgtgggaggcgcacaacccactcacagacaagcagatcgaccagttcctggtggtggcccgctctgtgggcaccttcgcacgggccctggactgcagcagctccgtccgacagcccagcctgcacatgagcgccgcagctgcctcccgagacatcaccctgttccacgccatggatactctccacaagaacatctacgacatctccaaggccatctcggcgctggtgccgcagggcgggcccgtgctctgcagggacgagatggaggagtggtctgcatcagaggccaaccttttcgaggaagccctggaaaaatatgggaaggatttcacggacattcagcaagattttctcccgtggaagtcgctgaccagcatcattgagtactactacatgtggaagaccaccgacagatacgtgcagcagaaacgcttgaaagcagctgaagctgagagcaagttaaagcaagtttatattcccaactataacaagccaaatccgaaccaaatcagcgtcaacaacgtcaaggccggtgtggtgaacggcacgggggcgccgggccagagccctggggctggccgggcctgcgagagctgttacatgtcgtctctgcgcatcttgttggacatattggaagaaatatggtggcttgaaaatgccaacccggttagatggagagaggccaggaccaaaccgcagtaacatgagtccccacggcctcccagcccggagcagcgggagccccaagtttgccatgaagaccaggcaggctttctatctgcacacgacgaagctgacgcggatcgcccggcgcctgtgccgtgagatcctgcgcccgtggcacgctgcgcggaacccctacctgcccatcaacagcgcggccatcaaggccgagtgcacggcgcggctgcccgaagcctcccagagcccgctggtgctgaagcaggcggtacgcaagccgctggaagccgtgcttcggtatcttgagacccacccccgcccccccaagcctgaccccgtgaaaagcgtgtccagcgtgctcagcagcctgacgcccgccaaggtggcccccgtcatcaacaacggctcccccaccatcctgggcaagcgcagctacgagcagcacaacggggtggacggcaacatgaagaagcgcctcttgatgcccagtaggggtctggcaaaccacggacagaccaggcacatgggaccaagccggaacctcctgctcaacgggaagtcctaccccaccaaagtgcgcctgatccgggggggctccctgcccccagtcaagcggcggcggatgaactggatcgacgccccgggtgacgtgttctacatgcccaaagaggagaccaggaagatccgcaagctgctctcatcctcggaaaccaagcgtgctgcccgccggccctacaagcccatcgccctgcgccagagccaggccctgccgccgcggccaccgccacctgcgcccgtcaacgacgagcccatcgtcatcgaggactaggggccgcccccacctgcggccgc

SEQ ID NO: 592 - DNA, 2133 bp, Homo sapiens
ctcccggcgcagtcaccggcgcggtctatggctgcgacttctctaatgtctgctttggctgcccggctgctgcagcccgcgcacagctgctcccttcgccttcgccctttccacctcgcggcagttcgaaatgaagctgttgtcatttctggaaggaaactggcccagcagatcaagcaggaagtgcggcaggaggtagaagagtgggtggcctcaggcaacaaacggccacacctgagtgtgatcctggttggcgagaatcctgcaagtcactcctatgtcctcaacaaaaccagggcagctgcagttgtgggaatcaacagtgagacaattatgaaaccagcttcaatttcagaggaagaattgttgaatttaatcaataaactgaataatgatgataatgtagatggcctccttgttcagttgcctcttccagagcatattgatgagagaaggatctgcaatgctgtttctccagacaaggatgttgatggctttcatgtaattaatgtaggacgaatgtgtttggatcagtattccatgttaccggctactccatggggtgcgtgggaaataatcaagcgaactggcattccaaccctagggaagaatgtggttgtggctggaaggtcaaaaaacgttggaatgcccattgcaatgttactgcacacagatggggcgcatgaacgtcccggaggtgatgccactgttacaatatctcatcgatatactcccaaagagcagttgaagaaacatacaattcttgcagatattgtaatatctgctgcaggtattccaaatctgatcacagcagatatgatcaaggaaggagcagcagtcattgatgtgggaataaatagagttcacgatcctgtaactgccaaacccaagttggttggagatgtggattttgaaggagtcagacaaaaagctgggtatatcactccagttcctggaggtgttggccccatgacagtggcaatgctaatgaagaataccattattgctgcaaaaaaggtgctgaggcttgaagagcgagaagtgctgaagtctaaagagcttggggtagccactaattaactactgtgtcttctgtgtcacaaacagcactccaggccagctcaagaagcaaagcaggccaatagaaatgcaatatttttaatttattctactgaaatggtttaaaatgatgccttgtatttattgaaagcttaaatgggtgggtgtttctgcacatacctctgcagtacctcaccagggagcattccagtatcatgcagggtcctgtgatctagccaggagcagccattaacctagtgattaatatgggagacattaccatatggaggatggatgcttcactttgtcaagcacctcagttacacattcgccttttctaggattgcatttcccaagtgctattgcaataacagttgatactcattttaggtaccaaaccttttgagttcaactgatcaaaccaaaggaaaagtgttgctagagaaaattggggaaaaggtgaaaaagaaaaaatggtagtaattgagcagaaaaaaattaatttatatatgtattgattggcaaccagatttatttaagtagaactgaattggctaggaaaaaagaaaaactgcatgttaatcattttcctaagctgtccttttgaggcttagtcagtttattgggaaaatgtttaggattattccttgctattagtactcattttatgtatgttacccttcagtaagttctccccattttagttttctaggactgaaaggattcttttctacattatacatgtgtgttgtcatatttggcttttgctatatactttaacttcattgttaaatttttgtattgtatagtttctttggtgtatcttaaaacctatttttgaaaaacaaacttggcttgataatcatttgggcagcttgggtaagtacgcaacttacttttccaccaaagaactgtcagcagctgcctgcttttctgtgatgtatgtatcctgttgacttttccagaaattttttaagagtttgagttactattgaatttaatcagactttctgattaaagggttttctttcttttttaataaaacacatctgtctggtgtggtatgaatttctg

SEQ ID NO: 593 - DNA, 5161 bp, Homo sapiens
gaactggcccagaatcactctcgccctgctccggcgtctgcgccgggcggcggtggcggcggagacccgaacatggcgaccgcgcgcaccttcgggcccgagcgggaagccgagccggccaaggaagcgcgcgtcgtgggctcggagcttgtggacacttatacggtttacatcatccaggtcactgatggcagccatgagtggacagtaaagcaccgctacagcgacttccatgacctgcatgaaaagctcgttgcagagagaaagattgataaaaacctgcttccgcccaaaaagataattgggaaaaactcaagaagcttggtggagaagagggagaaggatctggaggtctacctccagaagctcctggctgccttccctggcgtgacccccagagtactggcccacttcttgcattttcacttctatgagataaatggcatcaccgcggcactggctgaagagctctttgagaaaggagaacagctcctgggggccggcgaggtctttgccattggacccctgcagctgtatgccgtcacggagcagctgcagcagggaaagcccacgtgcgccagtggggatgccaagaccgacctcgggcacatcctggacttcacctgtcgccttaagtaccttaaggtttctggcacagaaggaccttttgggaccagcaacattcaggagcagctcctgccgttcgacctatcaatattcaagtccctgcatcaggtggagataagtcactgtgatgctaagcacatcagagggctggtcgcatcgaagcccaccttagccacgctgagtgtccgcttctcagcaacctcgatgaaggaagtccttgttcctgaagcctcagaatttgatgagtgggagcctgaaggcacaaccctagaaggccctgtgactgccgtcatccccacttggcaggcattgaccacgcttgacctgagccacaacagcatctccgagatcgacgagtctgtgaaactgatcccaaagattgagttcctggacctgagtcacaatggattgctggttgtggacaatctgcagcacctgtataaccttgtgcatctggacctgtcctacaacaagctctcctccttggaagggcttcacaccaagctggggaacatcaagaccttaaacctggcaggcaacctcctagagagtctgagtggcctgcacaagctctactcactggtcaacctggatctccgggacaacaggatcgaacagatggaggaggtccggagcataggcagcctcccgtgtctggagcacgtgtctctgctgaacaaccctctgagcatcatccccgactaccggaccaaggtgctggctcagttcggagagagggcctcagaggtctgtctggatgacacagtgaccacagagaaggagctggacactgtggaagtgctgaaagcaattcagaaagccaaggaggtcaagtccaaactgagcaacccagagaagaagggtggtgaagactcccggctctcagctgccccctgcatcagacccagcagctcccctcccactgtggctcccgcatctgcctccctgccccagcccatcctctctaaccaaggaatcatgttcgttcaggaggaggccctggccagcagcctctcgtccactgacagtctgactcccgagcaccagcccattgcccagggatgttctgattccttggagtccatccctgcgggacaggcagcttccgatgatttaagggacgtgccaggagctgttggtggtgcaagcccagaacatgccgagccggaggtccaggtggtgccggggtctggccagatcatcttcctgcccttcacctgcattggctacacggccaccaatcaggacttcatccagcgcctgagcacactgatccggcaggccatcgagcggcagctgcctgcctggatcgaggctgccaaccagcgggaggagggccagggtgaacagggcgaggaggaggatgaggaggaggaagaagaggaggacgtggctgagaaccgctactttgaaatggggcccccagacgtggaggaggaggagggaggaggccagggggaggaagaggaggaggaagaggaggatgaagaggccgaggaggagcgcctggctctggaatgggccctgggcgcggacgaggacttcctgctggagcacatccgcatcctcaaggtgctgtggtgcttcctgatccatgtgcagggcagtatccgccagttcgccgcctgccttgtgctcaccgacttcggcatcgcagtcttcgagatcccgcaccaggagtctcggggcagcagccagcacatcctctcctccctgcgctttgtcttttgcttcccgcatggcgacctcaccgagtttggcttcctcatgccggagctgtgtctggtgctcaaggtacggcacagtgagaacacgctcttcattatctcggacgccgccaacctgcacgagttccacgcggacctgcgctcatgctttgcaccccagcacatggccatgctgtgtagccccatcctctacggcagccacaccagcctgcaggagttcctgcgccagctgctcaccttctacaaggtggctggcggctgccaggagcgcagccagggctgcttccccgtctacctggtctacagtgacaagcgcatggtgcagacggccgccggggactactcaggcaacatcgagtgggccagctgcacactctgttcagccgtgcggcgctcctgctgcgcgccctctgaggccgtcaagtccgccgccatcccctactggctgttgctcacgccccagcacctcaacgtcatcaaggccgacttcaaccccatgcccaaccgtggcacccacaactgtcgcaaccgcaacagcttcaagctcagccgtgtgccgctctccaccgtgctgctggaccccacacgcagctgtacccagcctcggggcgcctttgctgatggccacgtgctagagctgctcgtggggtaccgctttgtcactgccatcttcgtgctgccccacgagaagttccacttcctgcgcgtctacaaccagctgcgggcctcgctgcaggacctgaagactgtggtcatcgccaagacccccgggacgggaggcagcgcccagggctcctttgcggatggccagcctgccgagcgcagggccagcaatgaccagcgtccccaggaggtcccagcagaggctctggccccggccccagtggaagtcccagctccagcccctgcagcagcctcagcctcaggcccagcgaagactccggccccagcagaggcctcaacttcagctttggtcccagaggagacgccagtggaagctccagccccacccccagccgaggcccctgcccagtacccgagtgagcacctcatccaggccacctcggaggagaatcagatcccctcgcacttgcctgcctgcccgtcgctccggcacgtcgccagcctgcggggcagcgccatcatcgagctcttccacagcagcattgctgaggttgaaaacgaggagctgaggcacctcatgtggtcctcggtggtgttctaccagaccccagggctggaggtgactgcctgcgtgctgctctccaccaaggctgtgtactttgtgctccacgacggcctccgccgctacttctcagagccactgcaggatttctggcatcagaaaaacaccgactacaacaacagccctttccacatctcccagtgcttcgtgctaaagcttagtgacctgcagtcagtcaatgtggggcttttcgaccagcatttccggctgacgggttccaccccgatgcaggtggtcacgtgcttgacgcgggacagctacctgacgcactgcttcctccagcacctcatggtcgtgctgtcctctctggaacgcacgccctcgccggagcctgttgacaaggacttctactccgagtttgggaacaagaccacagggaagatggagaactacgagctgatccactctagtcgcgtcaagtttacctaccccagtgaggaggagattggggacctgacgttcactgtggcccaaaagatggctgagccagagaaggccccagccctcagcatcctgctgtacgtgcaggccttccaggtgggcatgccaccccctgggtgctgcaggggccccctgcgccccaagacactcctgctcaccagctccgagatcttcctcctggatgaggactgtgtccactacccactgcccgagtttgccaaagagccgccgcagagagacaggtaccggctggacgatggccgccgcgtccgggacctggaccgagtgctcatgggctaccagacctacccgcaggccctcaccctcgtcttcgatgacgtgcaaggtcatgacctcatgggcagtgtcaccctggaccactttggggaggtgccaggtggcccggctagagccagccagggccgtgaagtccagtggcaggtgtttgtccccagtgctgagagcagagagaagctcatctcgctgttggctcgccagtgggaggccctgtgtggccgtgagctgcctgtcgagctcaccggctagcccaggccacagccagcctgtcgtgtccagcctgacgcctactggggcagggcagcaggcttttgtgttctctaaaaatgttttatcctccctttggtaccttaatttgactgtcctcgcagagaatgtgaacatgtgtgtgtgttgtgttaattctttctcatgttgggagtgagaatgccgggcccctcagggctgtcggtgtgctgtcagcctcccacaggtggtacagccgtgcacaccagtgtcgtgtctgctgttgtgggaccgttgttaacacgtgacactgtgggtctgactttctcttctacacgtcctttcctgaagtgtcgagtccagtcctttgttgctgttgctgttgctgttgctgttggcatcttgctgctaatcctgaggctggtagcagaatgcacattggaagctcccaccccatattgttcttcaaagtggaggtctcccctgatccagacaagtgggagagcccgtgggggcaggggacctggagctgccagcaccaagcgtgattcctgctgcctgtattctctattccaataaagcagagtttgacaccgtc

SEQ ID NO: 594 - DNA, 41150 bp, Homo sapiens
gatcagtgcagatctggaggcaaaaagcagacactcagctgttttatcattgtcctttcagtcaaaaaaccaactaggatgtcaattccaaagtccccaacccttcccaacttcagcatgccaatgaaatcacatacatatgaatccttgaatctcattagttaattttcctccatcaccagtgcaggcttcctagtcctcaacctaacatcctttctgcaatcattccagggagctcccagtgtgggtgagtctcacatgtgcttacaaataagtcagctccaccaggtacgaaagtgggttcccgctgtgggacactcttcttcaatattctgttgacatgaagccaaggttgcatgatagagtggacaaaatgggtagggagaaggactttctcctcatttgtacagcacttgggaagaagaatacccaaacttgcttaagccccagtagatattttattttttattcccaagaatctactcatgcataaagctaagatggacttctcttgggccaatgattcaagtgcaaggaatttattcgcaagatcattccagaaagctctagtaggagtgaggaagagtaggttgctgctgtgggcaactggggcttaatcccaaagagcatcctttgggagactctgtggatcatatccatgaattcccacagagagtggcgaggaagctggggtatttatccaccatctctcattcatccctcatatgttgagggttgctcctgccccacacaagagaaagttcccaggtggagagtctcaggtgttcagtcagatgctgtcagcaagcactagaatggtaagttccaagggtatacaggggtgcaccccccatacatccctcaactagcctgaaattccataaaagcagagactgggcctatataattcaccattctattctcaacaacttgtccgggagttggcacacggtaggtgcccaatacaggttagagggtaagggaataaacataaaataaagttgagacaaacctaaaagagactgtttcatcttcaaagacttagcctaaagggggtgggagaggagtaaacatttattagaagcttccacagaattcatgcttctgcaaacctgattgcccctaaatttagcacatcagtagttccaaagaagagactttaagacatgctttaagacaacaacaggtgtgaatctgcctcccagatgacaattggcaatgtctggagacatgttatattggttgtcacaactggaaaaggggtgctgctggtagctaatgggtagggaccagagatgctattaaatatcctacaatgcacaggacagctccccacagcaaagaatgatttggccccaaatgtcaataatgccgaaattaagaaaccttaggttagagggtggatacgtgaaccaattggagtcaatagaaaaatcaaccacaaggtcgagtgcgatgactcatgcctgtaatcccagcactttgggaggccaaggtggatggatcacctgaggtccggagttcgagaccagcctggccaacatggtgaaatcctgtctctactgaaaatacaaaaattagccaggcatggaggtggacacctgtaatcccagctacttgggagactgaggcaggagaattgcttgaacccggaggcgggggatgcagtgagccgagattgtgccattgcactccagcctgggtgacaagaacaagactctatcttaaaaaaaaaaaaaaaaaaaggaagaaagtaaaagaaaaatcaatcacaatactaggagtttctctcttccctggaaggagcaatatggcacctattttgataacacagagagaaggctggagctgtgtgatgtcgggaagagaggttctactgggtgccatgtggagcatgtagatgaaactgatgcccagagaaagctgtagagatgaagagaaactgagccattgttgaccacatttgagccactagatcaattctcccctgaagtaggtccttttaatttatatgagctaataaacccctttcttgtttaagccagtagacttttgtgtcatttgcaaccaggagcactccaactgacagaatcaacgaacattaaatcctatcctcctttcctgaagacaccagtgtaaacagaaccttgtcttggagcacgactggttgcgagtaacagaaacccaccgaagctggcacaagtaaagaagtatttattacatgggtccaaggttatctccaaaacccataggagcatgaagtaaaagtgaaattcatgcagaaccatgatcagatacttagaaagcaattaataaatacctgttgatctcaatggaatgaacactcaattaactggaattgataactgcactgggagccgagataacccccccagccctcaaggagccatttgagctctcatttctgattctccctgaatattagcttcattcttctgccctgtttgcttgtctctttgcccaccacctcgaattggccactgatatttctaaatctgattgtgaccttaagagctccaccaactgacaactttcttagcctctccattaaagaaagttctcgagcaaaagaatctgattggctcagcttaagtcaggtgacaaccactaatccaatcggtagtcatctgccaaaagaggaagcataagtagactggcaagtcaaatgtatttaccccaagatgggagctcaagttagccctgggtgggggagatagaagtcccactgccaccactccccaccttacctagacacagaccaacaacactgagtgttaactattcctttattaggtggtgaggggagtggggggctgtacaatgcagggcttgggaattcagctacacagggattttgaccagaagccatattacaaaaatagcctaaaaatacctctattctgccatgaggctgggccagaggattaccaggaagagaaagtaccactcaggcagctcctcttcttgtagtcccacatttacagggacacaaaggaatgcatacatctgccctggctcccatttcccaccagcagccccctagttcccaaagggagatggccaagggtggggctggggcagagggagttggcagtgggcccttccccagcaaggctatggaacatgtcccatctggaatgcagtgaagtgagggaggtggggtggggaggaggctcccaacactcccccgacccctggccccagtgggtgcgcccaagggtgcctacttggtacatacctgggtcgtgtactcggtacacgggatcccagtcatgcctgtgtactaggtacacagaatccagcttggccgaatgggcccacagactcagccccacgggggcactggggggttcacagggggagggagcatctccatatatatattttgtaaaaaataataataataagtttgtttaaatgaatttgtttctatacaaaatgtaaaaaaaaaaagaaaaataaaaataataataattcattcatgtcagagtgtaaggaaatgagaggccagaaggagagagaaaggaatgagggaagagagaagtggggaagaaggaggtcccagactcttcacaagactgagagggtgggtggtagcccccacccattataaataaaggaagactgaagccctgggctgatgacctatctcggtcacgctgcaaggcaaggatgcaggagggttggtggaaagagaagaggatgaaaaagactaaaaggaaggaagagacagagaaagaaaggaggcaggacgggggtctctttaggcccccaagatctaagaactgacgagcgtctcaggccaacacttgcctcttgggggtaacttccggctggggccccagctgggtctgggcctgagcaagggagctgggaacagacaagggaagtggctgggcaggcagtgccccagtggtggtggccatggccccagtggcagtggctgggctaggcgtggattcggaccagtctgagagggagggaggtgaggggctggcccagtgctcaggggattcgggggatggggtcaggtaagggtgctcactgggaacccgcaggaagcgggcctttggggggctgctgtgtgccccagccgccgggtactcctcgccatgtcctgggactgccaggtaaggcgggggccgctcctgcggggagacgggggtccctgggttgagcagctggggtcccggcgccagtggcagcaggaacgaggggcctggaggggcaggtgggggcagccgggcccaatcgaggggcacagccacagggttcagcaggcccaggctgagtacacatcctccagggggctggcgccctagacccgcccggcctgggccaccaagctgtgccagagacactgcagtggcagtggcagctgcatagggcccctcaagggggaagccaccaggggaagcagggggcccaccgaaaggccgcggggagtccagcgagtccacgggcgacagcgtgaccgagctgtcagccagggggcccgggcaggccagcgtcagcttcttgccccgcccccggggcccctgcggccccagccccgccttcccggggggcctcctgctcttcttggaccccgactgtgccgctttgaggccagggaggaaggcccctggaggacagagcagaggccccaggccgtggggaccgggggggctgcggggcccactgggttgatccagcaagcgcacgatgtcctggtgcagtctctcctgggctacgtcccgcggcagcctgtccaggtggtcggtgatctcacggttggcaaagtggtccaacagcagcttggcagcctcatagctgccctcgcgggcggccaggaataggggggtctcctcctggggggccagaacccacagaggtcagcgaaaccccagctaacagtagcaaagtcttccagcctcttgggggagcccgagagctatgagtttgtacactggagcttgacagacctgggttaaatcccggctgtgctgggggagcctggacaagttctttcctctaaaccacattcatccatcacctactaagtgccagaggtcaaggccaggactagggtgagttaagcgaggtactcaccttaggcataactttttttttcttgtctttttttttttttttttttgacagagtctcactgtgtcgcccaggctggagtgcagtggcgccatttcagttcactgcaacctcagccttccgggttcaagcgattctcctgcctcagcctcccgagcagctgggactacaggtgtgcaccactacgcccagctaatttttgtatttttaatagagacagggttttactacgttggccaggctggtctcaaactcctgaactcaagtaatccacccatctcgacctcccaaagtgctgggattataggcatgaaccaccacacccagccattaggcacaaaatttaaggggcccccaaaaactttagtcaccaaagtaaattatattttaatccaatgtttggggttttattttgttttgttttttgagagagtctcactctgttgcccaggctggattgcaatggcactgtgccactgctgacacccagtggaccaagggctggggctcaccttgctatcctgcatgtccttattggctccatttttgagcagggccaaagtggcttccacgttgttcacagccgcagcccagtgtaaggctgatttccctggaggatgaaggggagagaggtcaggaccaggcacctgtcctggggcccccatgtcagggaggcagaaattgtctagaatgtggcctaggggtagaggaggcaggcctgccgtgaatatccaagtacttgtgtctggatccatgtgtgtgcaaatctgcaaaatgactctgtgcaatggggaagcactttgtgtctgtgtgtgtgtgtttgtgtgtgtgtgtgtgtgtgcgtgcatgtgcatgactgtttatacacagggggtgctgtgtggacctccttcagttgaacctagggttgtgacatccaatacagtagtcagtcacatgtggtttttatttatccatttatttatttttgaggtagtgtcttgttctgtcacccaggctggagtccattggcacaatctcagttcactgcaacctctacctgctgggctcaggcgattttcctgcctcagcctccctagtagctgggactacaggcatgtaccaccatgcccagctgattttttgtatttttgatagagatagagttccactatgttgcccaaactggtctcaaactcctaagctcaagtgatccaccagccttggcctcccaaagtgttgggattacaggcatgagccaccgtgcccaacctacatgtggttctttagatttaaatttaataaaataggtgccaggaccattcaatggggaaagaatggtcttctcaactaatggtgctggaacaactgaatattcacattcaaagaatgaagttggacccctacctcacactttatacaaacactaactcaaaatggatcagaaacctaaatatatgagctccaactatagaactaaacatctagaagaaaacataagagtaaatcttcatgaccttgaattaggccaagattcttagatgtgacaccaaaaccacaaataacaataacaactacaaaacagataaattggacatgatcaaaattgaaacttttggccaggcacagtggctcacgcctataatctcaacaatttgggaggccaaggtgggagtattgcttaaggccaggagtttgagatcagcctgggcaacaaagtgagaccccatttccacaaaaaatttaagaattacccaggtatgctggcacacacctgtaataccagctattcaggagggtgggatgggaggatcacttgagcctgggagtttgaggctgcagagagccgtaatcatgccactgcactccagcctgagtgacagagtgataccctatgtctaaaaataaaagaaaaaaaaagtggtccatcgacacaatggattattattcagctgaactatgctacaacatgggtgaaccttgagaacataatgctaactgaaaaaaaggcagacaaaaaagaccacgtatcatatgattacatttatatgaaatgtccagaacaggcaaatccatgaagacaaaaagcaaatcagtggttgcacagggctggacagatgaggggcttggcagatgatggccaagtggtgagaatttatttttcaggtgatgaaatgttctaaaattgattgtggtaatagttgtatgactctgattatactaagagccattgaattgtacactttaaatgggtgaattgtatggcatgttaattatatctcaataaagcagttttttgttttttgttttttgtttttaaaaaaaaggatggactcagtggctcatgcctataaccccagcactttgggaggccaaggcaggtggatcacctgaggtcaggagtttgaggccagcctggccaacattgcgaaaccccgtctctactaaaaatacaaaaaaatagccaggcatggtgatgggcacctttagtcccagacacttgggaggctgagacaggagaatcactggaacctgggtagtggaggttgcagtgagccaagatcacaccattgcactccagcctgggtgacaagagtgagactctgtctcaaaaaaaaaaattaaaaaaagggcaacataaggagaaaaaaattaaatgaactaaaacatttacttcttcatttgcctcagtcacatttcaagtcactatatgtggccagtggctactatactggacagtgcagagaataattccatcatcacagaaagtcctattggccagccctgccctagaactgtggctctcaactaggagaaactccctgcccccagcccccagagcatttggcaacgtctggagactgttttttttttttgagatggagtctgtcccccaggctggagtgcaggggcacaatcacggctcacagactcaacctcctgggctcaaacgaccctcccacctcagtttctggagtagctagggccacaggtatgcaccaccgcacatggctaatctttcaaaaaacttttgtagaacccactatgttgcccagtctggtctcaaactcctggcctcaagtcatcctcctgcctcagcctcccaaagtgttgggatcacaggcatgagccaccacacatggcctgatgtgtacgtttattataataacttccagcaggtggaagtacagtgtgtccgtctaacaaagcaggtggaaatgaagtatctaggggaaaggcacctttttctaaatccctgaggcaccctaaggactagtggtgaccctgcatgaccctgcaggcttcatgaagcctggttatgtgtgcgtgagcttcagtgattgggtctcaacatgggtatgaatttgcaccaacatgaccctcagggcccaggtgacaccaacccagcttagacttgattcctctgccaacctaccaagctcatccacagcattgacatcagcatggctggcgatgagctcttccaccatgccctctactgccaggcgggccgccaggatcagtgccgttgagccatctgccatgcgggcatccaagtctgtagagcggtttcggatgagaatctaggacagagagtggatgcagcaggaggggtcatggcaggaacagaggaatcaggagcacccctaagtcccatgaagtccccaacccccataccccaacccctgaaattggtgaggttcagggagcagctgcttgacagatactgtattcccatatatccccattttccaaatgagaaaaaatgagtctgaaaggcagaactggggctcaaacccaggtaagtctaatgcctgccccagctctgaggtccaaagtgtgtgcctatctcacctggaagacaccctgggcatcggctgtgacagctgtgtgcaggggagtgcggcctgagtggtcctgggcattggtgtctgccccagcatccagcagccgcttggctgcatcagcacgggcataacgggcagccaggtgcaaagcagtctcgccagtacggtcagtccgtgccccaagctgagccccctggcagatcaggtcggagatgatgctagctgatgtgtcatctgcctcatcctcttcagttggcattggctccagagcccccccacagaaggaagccagcattagcggggtgaagccatctgcagggacaggagtgtgtcagcaggaaggtaaacacagggccttttccaggaaatgttatcaagggtaccccattaggagctaatgggacacatggaaaaatgacaattagcagatcctcctgtctgcacacccacacccagaatgaggattcgtgggcacgtgatttgtcacagaactactcctagggcacagggaacacaggacaagggactctgggagtcaagcaagtgtgcaacctccagtaaattcccaaagggttattccaccttgatcctccaaagggactctggaacatgtgttgtaccccagagttctaatccaactcaaggcaaagaaaccatccccttcatactcctgcacccactggttaggagctgcccctttctgccaattcatttgagtgttttaaaagggggggggaaaaaaagagctgcccccagggacataaaatcccaggcacttcaggccccagcagccagagggacttcaaaagagagccataagtacaggccatttggagcataagcaaaatgaagctaaggcaggaatgccctgaaacataacaaagatggatctaagaggatcaaacaacatagtccgctacactgcacacactgtacacaagcacttgtcctcatttttcttagggagccacttgcatccggttctccattctcaagccctgggtagagactgacctccccgctccaccagcagacccgacccccaccagctcaaagacaggtatgtgaatcaggcttggtcaatttgcatattccagccccctggtcatactgattggctcaaggatgagcacgtgaccctagtctgtccaatcagaatgcatcctgagacttttctggagcattaagaaggttttgtaagattggagtcaaagggtagagaggggaaaactgagtcctggatccaaatgtgccacttttagttaaatgagttgataaatcccttgttttacttaagctagtctgagttggacctttgtcacttccaaccaagagtgttgctgaatacacacacccttcacagaagcttagagactcccccagttctccccaaaacacagagtcagaaataacctctcacaggtaggatgggtgaggggcatccctttgggaggggcactgtcactaacctgggccacgcacattgacatccatgccatcagcatctgcgtcgccctgtggtggtgtcagtgccatggctggtgccacgcggatgtcagcagcaaccagatggtgttgagtccactgacggcaatccacagcctcctcagcccccatgcctggctcctctacctggaggggcaggcaccctggatctcagatctcaccctttggtgctggggagagccactgccagggatggggctgggcattcctacaggtttctctttaggagatacacacagagccctgggaaatcatttaccatctgtttggtgttttatttgtttttgagacagagtctcgctctgtcccccaggctggagtgcagtggcatgatctcagctcactgcaacccccgcctcccgggttcaagtgattctcctgcctcagcctctggagtagctgggattacaggcacatgccacggtgtccagctaattttttgtatttttagtagagaaggggtttcaccatgttggccaggctggtctcgaactcctgacctcaggtgatcagcccctctcagcctcccaaagtgctgagattaacaggaaatcaatgtgtgccatagcccaaggaggtaataaaaggaagacacaaggtttctttttttttttttttttggtctttttgagtaataaatggctttaattatttatgtatatattttttagagactgagtctcactgtgtcactcaggctggagtgcagtgctgcaatcatacctcactgcagcctcaacttcctgggctcaaatgatcctcccacctcagcggcccaagtagctgggactataagcacacagtataagcagattgggatagcatctgatccaggttcaagttccaaccccaccccttagtagctggaaggctctgggcaaatcactttgaagctctgagcttctcattggcaaaatcaggatgacgcagccattccaccatgctaagataccaccacaattacattgggccacccctttaatacctctaatacctactttgggatgggaaggcagaaggaaaagtctgggttgagcaggtttttttatctgtccactgtaatagatgattccatttcacaacattaaaatatggacagaggaagggagtttgtaaattgaagtatatgtcaatagctactttacagcgtcctcagagagatgaaataagatgttttatgtgcattagagacattcagcgggtgcctcagtaatgctagcaggatctgtatggactcaattgtgccccctctaaaaatcatacaatggccgggcacggtggctcacgtctgtaatcccagcactttgggatgccgaggcgggtggatcacttgaggtctgcagcttgagaccagcctggccaacatggtgaaaccccatctctactaaaaatacaaaaattagccgggcatggtagcacatgcctataatcccagctactcgggaggctgaggcaggggaatcacttgaacctgggaggtggaggctgcaatgagccaagatcacgccactgcactccagcttgggcaacagagtgagacctggtctcaaaaaataaataaataaataaacagaaatcatacactaaaaccctaaataatatataaaatttccatgtgcctgcatttgaagataggactttatttttagacagggtcttgctctgttacccaggctggagtgaagtgatgcagtcatagctcactgcaggctccaactcctggactcaagtgatcctcctgcctcagcctcccaagtagctgaaattactggtgcaagctaccaagcctggtgagatagggcctttaaggaggtaattaaggttatatgaggttataaatgtgggaccctaatccaataggattggtatccttacaagaagaggatgggatgtcaaatctgtctctctctctctctctctctctctctctctctctctctctctcccctctgtgtacacagaggaaaggccatgtgaggctacagtgagaaggcggccatctgcacaccaggaagagagcccttaccaggaaccagccctgacagcaccttgggcttggacttccaacctccagaaccgtgaaaaaattaatttctgttgtttaggtcacccatgctgtgggacttttttttttttttgagacggagtttcgctcttgttgcccagtctggagtgccaggttcaagggattctcctgcctcagcctcccaagtagctgggattacaggtgcccgccaccatgcccagctaatcttttgtatttttagtacagacggggtttcaccatgttggtcaggctggtctcgaactcctgacctcaggtgatccacctctgtgggattttttaatggcagccaaagctgactcatactgaacccaggggcatgactccatgagctcagaaccggctcagagcactttcaggctaagtccatgctggacaaaataggaactgacagagataaggcagactcgctctctgggctggggggacacctccaggaagagtgcaggctggccaggaagcaggatcctggctggggaggggcaggatggaggggaggattttccacctgcccggagggacccttggggccccagtggcaaatcttcctccctctgaggtcacagaaccacactgagaagaaagggttgcaaagctgggactattctctggagctagggaggtggggacagcggtgccatcccctgatcacgcccatcatccactggggaccccacccagtaccctgaggggaggggtcagaggagggggcaaaggtcagagggggggcagtacctttagccgcttggcctctgggcactctgtgtccatccagtctgtggccacctcccccatcaggctctcacccttggccatgttcctggcggacaatgggaagaggggatgtgagggggacactagaggtgtccagctgggaaggaggatttggggtggggtcagaggtctgagtcaggtcaaggcggggtccagggttcacaaggtccccgtagtcagggacagggagcgagcagggttctcacttcatgcccagcgcgtcctggcccacgggttcccgccggcccttgtgaccagaggccacgtccttgtgcagtgagaagccctcagggaaccagagggtgctgtgctcgcgcttgcgccgggccaccatgacacccaggacgagaatgaccagcagcaagacagcgcccgccactagcagtggcagcagcgggacgctgggttctggaggctccagcggctcccctaagagcaggaagcagagggcggggcttcagccgagggcggggctttggcctcaggcggggcttcggccgcccccagctccgcccccgccaccccctccccaaggcagggccgcaccccgcacgtcccgcagtgggtacgggaagtccaggcgctccaccgctgacaacgctcccaggtagtcagcggcgctctgggcatcggggaagcagtgatcattctcaggcgactgcaggcagagccggttgtcaatctccagcattactaccgagctgcagggacagcagggagggaccagagggctcaaaaattgcccgatgcaccccctggtaccaagccccactttccctccccagcgcctggctctgaagcgccatctccacccacaggtctccatggcccacctgcatccacctggcatccaaccccactgcacccctaaaacgtgtcttgctgtggtcagcagtccccccagagccatgaatccaatggatattattttttgatcttgcaccgaggctggagtgcagtggtgcgatctcggctcactgcaacttcccctcctgggttcaagcgattctcctgcctcagcctcccaagtagctgggattacaggcgtgtgccaccatgcccagctaatttttttgtatttttagtagagacggggtttcaccacgttggccaggctggtcttgaactcctgacctcaagtgatcctccctgccttggcctcccaaagtgctgggattacaggcgtgagccgccactgtgcctggcctgttttttttgttgtttgtttgttctgttttgttttttgagacggtttcactctgtcgcccaggctagagcacagtggcgaaatcagagctcactgtagccttgacctcccgccttcaagcaatctttccacctcattctcccaaagatctgggaccacagacatgtgccaccacacctggctaatttttggggggggttgggggtggaggcatagagattaggtgtcactatgttgcccaggctagtcttgaactccggggctcaagcaatcctcccacctcagcctcccaatgtgctgggtttacaggcctgggccactacgcccagccaagggacattgtttgttttttgtttttgagatgaagtcttgctctgtcgacaggctggagtgcagtggtgcaatctcagctcactgcaacctccgactccctggttcaagtgattctctgcctcagcctcctgagtagctgggattacaggcacgcgctgccacgcccaggtaatttttgtatttttagtagagacggggtttcaccgtgttggccaggacattgtatttgtttgtttgtttgcttgttttgagacagagtttcactcttgttgcccaggctggagtgcaatggtgctatctcagctcgccacaacctccacgtccagggttcaggcaattctcctgcctcagcctcctgagtagctgggattacaggcatgcgccaccacgccccagtaattttgtatttttagtatacacagggtttctccatgttggtcaggctggtcttgaactcccgacctcaggtgatccacccgcctcaacctcccaaagtgctgggatcacagttgtgagccatcacacctggcctcttcctcttttttgagctaattccattcatccaatccttaggtctccgtgtccccagattaattcttctgttccttctctccccactcctttgagtccctctcatggcttcaatgatcatcaacacttttatatctttcttgtttgtgtctttagcccccaggtatctccttggaggccttcccaatacttccaggtccctcagactctgcaagctccaaaatgacctgtttttcactttgtggccctatcactcagcttagccaggggctggtacaccaaccactctccttcatccctctacccctccccttccaccacccacatcccaatatctgcaaaacccaaccctcctctctgtatcagagacccacccctctcaggtctctgccttctcctcaacaatagctacacctcccttctggtacctctaccaggccactagcaggatacttctatattttttctttttctttttttttttttttgagacagagtctggctctgttgccccggctggagtgcagtagcacaatcttggctcactgcaaccttcacttcctgagttcaagtgattctcatgcctcagcctcctgagtagctgggactaaaggcatacaccaccacgcctggctaattttttgtatttttagtagagacagggttttgccatgttgcccaggctggtctcaaactcctgacgtcaaatgaactgccttccaaagtgctgggattacaggcgtgagccaccgagcccctcctatttctttcttcttcttcctcttcctcctcctcctccccctccccctcttccttcttcttcctcttcctccccctccccctccccctccctcctccctcttcttcttcttcttcttcttcttcttcttcttcttcttcttcttcttcttttttttttttttttttttttttaagagatcggaggccgggcatggtggctcacgcctgtaatcccagcactttgggaggccgaggcaggtggatcacgaagtcaggagatccagaccatcctggctaacacactgaaaccccgtctcttactaaaaatacaaaaaattagccaggcatggtggcggccgcctgtagtcccagctactcgggaggctgaggcaggagaatggcatgaacccgggaggcggagcttgcagaaagccgagatcgcgcctctgcactctagcctgggcgacagagcgagactccgtctcaaaaaaaaaaaaaaaaaaaaagagagagagagatgggagtcttgctatgttgcccaggctagatttgaattcctgggctcaagtgatcctccaagtagctgggactacaagaatatattgtgcccggctttatcttctatgtctttaagaagaagaaaattagcccggtgtggtggtggatgcctgtaatcccagctactctggaggctgaggcagagaattgcttgaacccaggaggcagaggttgcagtgagctgagatcacgccactgcactccagcctgggcgacagagactccgtctcaaaaaaaaaaaaaaaaagaaaagaagaaggagaaggagaaggagaaggagaaggagaaggagaagaagaagaagaagaagaaaaaaaccctacacatgtatttaaccactctgccaagccacttagcaacctgcctccccacaagccagcactagacctgggcaattctaccccagaagcactagctccatctggaggcattttttgcttgtcacagccaggaggcggtgctcctgacatctggtgggtaaaggcattaagtgaaatgaaacacacaagacctggatcaacagcatctctcctctccccagccaccacggcttttccaggtggggtcactcacccgatcacctcgggggccagctcccgacgggcccggggttcggagccaggactaggccggtggtaagggaagaccatggcctggccgtgcgcgtccaggcggaagcgcagcgaggtgcgcaggatggcgctgagccgctgcagaaagtcggcgctggaacgcagtagctcctctggcggcagcagcactgtgagcaccagcacgccgcgggccagcagggccggcacctcgctggcacaatccagcccatcccagccgcactcctccgtgttgcagccctggtcgcagcggccgtcggcaaagtggtcggcgcagtacttctcgtacaccgggctggtggggaagggtgaggcagagaggggcggagtcaggggtcagaggagacaatccccttccatgcattcacaccgtagagtacagagactccagacaaggcttgcacaggggactggaatatacggacccatgccaggctttctgcaaatcttgccattcactggataattttttttttttttttttgagacggagtcttgctctgtcgcccaggccggaatgcagtagcatgatctctcagctcactgcagcctccacctccccggttccagcgattctcccgcctcagcctcccaagtagctgggattacaggcatgcaccaccacgcccgtctaatttttgtatttttagcagagacggggttttactatgttggccaggctgctgttgaactcctgacctcaggtgatccacctgcctcggcctcccaaagtgctgggatcacaggcataagtcaccgcacgcagcccttgataatatttttttaaattgattgattgaaatggggtcttgctctgttgcccacgccggagtgcagtggtgcaatcatagctctctgcaatctcaaactcctggactcaaattatcctccctcttcagcctcccaagtagctaggactacaaacccacaccacactcccggcctcactggctaactattaattaatcagtaaatactaactgactaccatgtgttgggcactgctgcaggcacaaggataaggcccggccacaattcctggtccacgtgcagctggcattccactgggtgaagacagatagtaagggagatacatgagccaaatatacagcatctccattactcatcaataaaataaaaatacaggctgggtgcggtggctcatgcctctaattccagcactttgggaggccaaggtgtacggataacctgaggtcaggagttctaggccagcctggccaaaatggtgaaacccccgtctctactaaaaatacaaaaattagtcaggcatggtggcgggcgcctgtaatcccagctactcgggaagctgaggcaggagaatagcttgaacccaggaggtggaggttgcagtgagccaagatcacaccactgcactccagcctgggcaatgggagagaaatcctgtctaaaaaaaaaaaaaaaaaaaatacatatatatatatatatatgtatatatatgtatatacacacacacacacacacacacacgcacgcacacacatagtgctggatggaattaaatgctaagcagaaaaataaagcagaggaagggctgggggtgaccagggaggtgctcactgagaaggtaccaccatttcagcaaagacttgaaggaggtgagggaggagccatgtgggggaagggaacagccaggcagtaggaacagcttgtgcaaaggccctgatatgggatcaagcctggggtatctgggaaacagcagagaggccagggtggctggaacagagtgagtgaggggaaagcagagaagatgaggatgtggagattaagggggtggagggttccaagcagacagagaggtacgcagaggacagaaggggcagggtgtagggatggacagatggactgcctaggacagacagagagaggggcagaagaggggcagagatagtcaggggcacccacagatagccatatagaggagcaaaaagagtgcatggatggacagattcggcccaaggatggacaaacaggagtggaggaagacagttgggtacacagaggaacaaaagcaatttttttttttttttttttttttggtgagacagagatttactcttgctgcccaggctggagtgcaatggcacgatctcagctcacctcatcctccacctcccaggttcaagcaattctcctgcctcagcctcctgagtagctgggattacagccatgtgccaccacacccggctaattttgtatttttagtagagacggagtttcaccatgttgcccaagctcaaactcctgacctcaggtgatctgccctcctctgcctcccaaagtactgggattacaggcgtgagcactgtgcccggccaataaaaggaatttttaggctagatgtggtggctcaggcccacaatcccagcactttgagaggctaagctgggtggattgctttgagctcaggtgttcaagactagcctggacaacatggcgaaaccccatctctaagaaaaagcacaaaagttacccgggcgcggtggctcacacctgtggtcccagctcctagggaggctgaggtgtgagggttacttgagcccaggaggtagagattgcactgagccaagatcacaccactgcactccagcctgggccacagagcaagaccctgtcttaaaaaaaaaaaaaaaaaaaaaaaaaaggagccaggtgcggtggctcacacctgtaatcccagcactttgggaggccaaggcgggcggatcacaaggtcaggagttcgtgagcagcctggccaatatggtgaaaccctgtctctactaaaaatacaaaaaaaaagccaggcgtggtggcaggtacctgtagtcccagctactcggaaggctgaggcaggagaatcgcttgaacccgggaggcggaggttgcagtgagccaagatggagccattgcactccagtctgggcaagagagcgagactccgtcttaaaaaaaaaaaaaaaaaaaaaaaggaattcggctgggcacggtggctcacacctgtaatcccagctactccagaggctgaggcaggagtactgcttaaacccgggaggcagaggttgcagtgagccgagatcgcgccactgcactctagcctgggccacagagcaagactccatctcgggaaaaaaaaaaaaaagtaattattggatggagaaaagggcagacaaacggggcagagaagtgcataggcagatagaaacaagaacaagatagacagagcacatggatgaacagacacacggacagacacgtgggacacaccgatgggcagatagagtgcacagagaaacagacggggcaagtggatgggcaggtggaaagagaggcagggcccacggacaaacagactgggatggatgcatagacagacggatcgatcgggtggatgggctcacttgcaagtgcgctcgcggccaccggcgtggcagtcgaagttgtcgtagaggcaggcgggcgagctgcaggcggggtcgcagcggctgttgttgaagaggcgccagcactgcagcgcctcgcattgccgccaggggtcgcccacgctcagcgagcagtcgccgccgtcccagccgcagcctgggctgttgcactcgcggtcgcagcgctggtccccgcgcttggcctggcaggcggcgcgcgggcaccgcggctcctccgagacctcgggtgccgcggcgggcgcctcgcagcgcggcccggtccagccctgcgcgcaagcgcagcggaagaagggcgcgagcggcgcggggcggcaggagcccccgtggagacagggggcggccgcgcagctggcgttgctggcccccggcggcgaccccgggaagctgcggcaggagggtcccgacaaccctggggggcaggcgcagcgcggcccgcggggcgtctgctggcatgggacgcccaccgggcactgcagctcccggcaggagcgcgccacccgctcgcaacgcggaccccagaacggctgggggtcgggtttggggagggagggataaaaatgagggtggggagtggagggaaggaggagaagaaatggaggagtggggaaaagaagagtcaaggggagagagggggaagagaagaggtcaagactaaggaaggttgagaccccctcaacctccccatgtcccacccaaccgctcccctttccacactggagaccccacctggcagataagccctgccatcccaggaggccacgccccccaatcaccatcctcacccttttcccttcaaacctccaggaaatgtcggggcagggggttgtttctttgttttttgagacggagtgtcactcagtcgccaggctggagtgcaatggcgtgatggctcactgcaacctccgcctcccgggttcaagtgattctcctgcctcagcctcccgagtagctgggattacaggcagctgccactacgcccggctaatttttatatttttagtagagacggggtttcaccatgttgcccaggctggtctctaactcctggcctcaagtgatcctcccgcctcggcctcccaatgtgctgggattacaggtgtgagctaccacacccggcggaaatgtcagcattttccagaaactcccttcccttcgatgtctcccctaaagccacatcctcctcctagacgccacgcccctactactccagaggccacgcccctactcctcctccaaaggccgccacccacacctacctgggcacagtgacaggtgaaggtcagcccacccccaggacccgggctaggacggcactggcctccatgctggcatggctgggactcgcagggagacaggacagtctgacagcgaggacctgagcgagcgggagcatgtagatcagccacaatgggggaatgacaggcggggtcccaggccagccccttcgccaacgcttacctgagaagccagcatgacaaaggcaacggaaacctccgcctgggtcctgcaggcagtcccgggtgtgtgccgcgtggcaggcacctgagcgacactcattgatgtctgcctcgcagcgcaaaccagtgtatcctgggggacaggtgcagcggaaaccacccaccaggtccacgcaggtgccattgtgtaggcaccggggccctgagtccagcggtgggcctgggccgcagtcatcctcattaatctcgcagagcacccctgggggaagaaacgaggggtggtcaagagggaatgaagacagcctctcatcctgtccccccaaccctggccctggcatacccagcgttcctgggggacaggagcagagatagcgggccacgaggtcaatgcatgaacccccgtgctggcagggctgggaggcacactcgtccacgtcgtcctcacagttatcaccattgtagccaggaagacacttcagtggggtaagagagggacccactcagcttagtgggacacagacccacctggacatacccatgaagacgcaaagaaccccagcacaaaaggacacacacagatgttcagcgcactaccagtaggtaatcccagcactttgggaggccgaggtgggcagatcacctgagatcaggagttcgagaccagcctggccaacatggtgaaaccctgtcactatgaaaaatacaaaaattagctgggcgtggtggtgggtgcctgtactcccagctataatgagaggctgaagcagaagaatcacctgaacccaggaggcaaaggttgcagtgagctgagatcgcgccactgcactcgtctgggtgacagagtgagaacctgtctcaaaaaaacaaacaaataaaaaaacaccccagatctacccagagtgacacccacagatacaccaagagtcacaaaagcaaaaactcagacatatctagagacatacccataccaagccacacagaaatgtgtgcccagacgcacccaagcatgcccacctcctcttccctctcctggggagcgcccccttacctcacacatgtagccccccatatagccacggcaggtccccccatgctggcagggctgggccaagcaggggtccacctcctgctcacagtggctaccagtacggccctctgggcacacgcagtagtgggagctgtcttcatccacacactgcccacccgcctgacacagctgctccagccgcacccctgcaaagaggagagtggcacaggaacagaggtaaccccatacatcccccttctgcctccatcacacagatcattcaacatccttggtggaatgagtccccaggatcgcacccacactccatcaggttgtcacacatccccccagcaggcaaggtctcatcactgacatacacacacatgccttcaacgctcacagcagctcggtcacaccctgtagcacacacaccatccctgctgtctcacagtgacagacacacaccatcccggccagttgtcacatgctcacacacccacaccactcagccacacaccccatcatgccccataggctctgtggcacccccattcggctcacactagcaggaggtacgtgcatgagccccttcccaaggccccacacgcccgcccacatgctcccactcaccgatctgggctgcggcctccctgcagggcaagcttcggatgtcacagaggcgtccgctccatccagggggacaaaggcaataggccccagtctggacgcagcgacccccgttttgacaaggctggcggctgcaccaatccaccagcgtctggaggggaagcactcagagtcagtactgtggggtggggggtagtctgggagaaactgtgccccgacttggcttctccctcctaggatcccaggcaggctcctcccccaggtccccagtaactccacccacctggcactgcgggcccgtgaagctctcgaggcaggtgcagcggaagccagggtgggcggcgctgcagacgcccccgtgtaggcagggccgcgagaggcaggggtctgcctcatgttggcagtgggctcctgtgtagccgggacggcacaggcagctgaacgagttcacgccgtccacacaggtcccgccattgaagcaggagctggagcggaaggagtgggagggaggatcaggctccgccccctcacaggccctgccctccttcctgagtcccgctgttagcgctggggacgtcccactccctgacccttatctcggcaagaagctgcagccccagcagaagccaatcaggtcccttagctccaattcaccagggacttcagccctaaggtgagagccacctggaagccatgccctctcaggcaccagagactccaaggtgagctccaaacagacgccctgctccttccctggccctgccccatcagtcatcagagtccgcagtgggtaccaagctgaggactcccccaagtcgttgctgtccccacttcgtcccaggtcccaggccccatcccaagccagagtccctgctctccaagcagaggccccgcccacctggggctgcagtcgggcaggtcctgttcgcagtggaagcctccgtagcctggcgggcaggtgcaggtgaaggaggccacgtggtcggtacaggtgcccgggccgcaggggttgctcaggcactcatccacatcgcgggcgcatcgtgggccggcgaaaccagggaggcaggagcaggaaaaggagcccacgccgtcttggcacgagccaccgttcaggcatgggtctgcggacaggaggaaggcggtctggtcacctaccttgcccccattagcccagtctgactgggatatgccttggattgagaagaattcaggaggaaaccaggttcaactgggatggggtgcatttggtcagaggaatctaaatccatccccttctgtggcctcgtcccctcctttatctggaaacctcacctatgtggcaagggcaggatgttgggaaaaccaaaaggtccctttaagctgccaagcaaacgctgctaattgtgcctgatctaattcctgtgcttggaacaggacaaggacagtggccattagccacatgtggctactgagtccttgaaattgtgactaaatggagatgtgctataaatgtaaaatacatactgggtttcagattttgaagacttggtatgaaaaaaaaaataggctgggcgtggtggcacacacttgtaatcccagcactttgggaggccgaggtgggcagatcacttgagctcaggagttcgagaccaacctgggcaacatggcaagaccccatttctataaaaaatacaaaaattagctgggcatgatggtgcacacctgtagtcccagctagtggggaggctgagacgggaggatcacttgagcctgggaggtcaaggctgcagtgagtcatgatcgcaccactgcactccagtctgggcgacagagtgagaacttgtctcaaaaaaaaaaaaggaaacaatgtaaaatatctcattaacaattttatactggttacatgttgaaatgatatgttaatatattgggttaaatagattatatacatttatttatttatttatttatttacttttatttttatttttattttttttgagatggggtttcgctcttgttgcccaggctggagtgcaatggcacgatctcagctcaccacaacctccgcctcccgggttcaagtgattctcctacctcagcctcctgagtagctgagattacaggcatgtgccaccacgcccagctaattttgtgtttttagtagagacggggcttctccatgttggtcaggctggtctcaaacttctgacctcaggtgatccacctgcctcagcctcccaaagtgctgggattaccggtgtgagccactgcgcccagccgattatatacattcaataaattaaatttaaatatattaaatttggtcaggcacagtggcagcagtctgagagtccaaggcaggaggatggcttgaggccaggagtttgagaccagcctagacaacgcagtgagaccccatctctacagaattaaaataaaaatattagctaggcatgtagtgagtgcctgtaatcctagctactcaggaggttaagacaggaggaatgcctcagcccaggagttcgagactgcactgagccaagatcgcaccactgcactccagcctgggcgacagagcctcactctgaatacataataaataaataaatataaaatattaaatttaatatctcccatttctgtttattttttaatgtggctactagaaaatttaaaattgcatatgtggcttgtgttatttatctgtttggcagcacccctttttgtttgtttgtttgtttgtttgttcgtttttgagacggagttatgccttgttgcccaggctgcagtacaatgacacaatctcagctcaccgtaatctccacctccaaggttcaagtgattctcctgcctcagcctcccaagtagctgggattacaggcatgcgccaccatgccctgctaattttgtatttttagtagagatggggtttctccatgttggccaggctggtctcaaactcctgacctcaggtgatccgcccaccttggcctcccaaagtgctgagattacaggtgtgagccacctcgcccggcctctggggggccttttatctcatactttgcacatgatattaactcgattgctctcaaagacagtgcacttaggtcgggtgtggttgctcacgcctgtaatcccagcactttgggaggtggagacaggtagattgcttgagcccaggaattggagaccaccgtgggcaacatggcgaaactccgtctctacaaaaaacacaaaatattagctgggcgctgtggtgtgcgcctatagtcgcagccactggggaggctgaggtgcttgagcccagaaggcagaggttgcagtgagcgatgattgcaacactgcactccagcgacagagctaagactctgtctcaaaaaaaaaaaaaaaaaaaaaaaaaaaagaggcagcacacagactccaaggttctaagcccagctcattccctaactcgttccatgggcttgcacaagaagtcactcaacctcctcgggcctcagtttccatataaataaaacgggaaaagtaagataactgtgaagatgaaatgacagcacagtgccaggcacacagttcaagcttaatgactgtgttccccagagcagcacccccaagagctcccctgcactcactggggtcacagtcattgatgtcctgatcgcaggaagggccagtgtaccctccatggcaggtgcagctgaaactccctgccaggttggtgcagataccatgagggccacagggtgcggggccagcacactcgtccacatcctgctggcatcgtgggcctgggggtagggagcaaggttacacctagggttacagggtacagagcagggtctcagggacctggggctcaggaagaacctgcaggccgagatgggtgaaggcaaaataagccgtgctgtcattcgtgtctgggcattttgcatatgcagtttcagaatggccgtctccctgtctcagtaggtggcaaatacctactatgaggtctgctcctccaggaagctgtaccctaaaccccgccctaagtcccagcatctctagccccataactcttcctcttccaagggctgacccacacaggctgcatatcagtgtccagctctgtccttccaagaaggaagcccctctcaaaggcagggctggggatgggtccctctctggatccccagcatcatccctgatagggtagggggcagaggagatggagaggaggagggaagagaagcaggtggcataccttgccagccctgggggcaggagcagacaggcagctggccaggggcagactcgcagcggcccccatgctcacaggggttcggggtgcagggggagaggagttcacactgacgtcctgttgggggtggaagagagggaagcagagatagccttgagggactccctgatcccatctccccccacctcccccaaccccagggtccccaccttgatacccacctcccaagctcctggagggaaatgattgaaagcaaaaaagaagctaacatagcgggaggagagagtagaggagaagagagatgagaaggcccatggtgttggtggggctgcagagggaaggtgaggtacacaccctggacaccaggcgggcaggtgcagtggaaacccattccatcgctgctgcatgtcccaccggccctgcacggctgggactcacaggcgtctcgggccaggctctggctgcagcgggggccactccagccaggctcacacacacagcggaacctggcaggggaaggtagtcaggccagggaggtgggccagggagagggggcagtgtctgaggctgagaagggccctcacccgccaggtgcatcatagcagatgccgtgactgcagggctcatgggcacagggatggctcggggggaggcagagtgggggcaaggagccaggcgggcagaggcagcggaagccattttccccatccacacaggaacctccctcgccgcatgggctggaagcacactcattgatctccacgttacaaaggggccctggggagtacacaagcaatctcatctcagaacaaagtcagcagggacaaccagggagggacgacgtgaccccacttagcacacccacacccccgagcaatgacctctttttcataacgcatcagctcttgtgcagattaggacacccgcctcctcaaccaagagctgacttgccccagatcattctggtccccaaacttccatgaagtccctttctttttcttttcttcttcttcttattttttgagatggggtctcactctgtcgcccgggctggactgcagtggcatgatcatagctcaccacagcctccacttcctgggctcaagcgattctcccacctcagcctcccgagtggctgggactacagttgcgcaccaccacgtctggctaattgtgtgtgcatgtgtgtgcgtgtttatctacgtattgactaatctggctttgggagtgtgtttattttttgtagagacagggtttcattatgttgcccaggctagtctcgaactcctgggctcaagtgatcctcatgtctcagcctcccaaagtgctgggggattacagacatgagccaacacacctagcaaagtcacattcatttccactaaggattagtttagacccattcagaaataacctagtcactgagtttggacactttcatctatgttccagaataatctttttgtttgtttttgtatgtgtgtgtgtgtgtgtgtgtgtgtgtgtgtgtgtgtgtgtttgaaatgaagtctcactctgtcgcccagactggagtacagtggcacaatcttggctcactgccgcctccgcctcctgaggtcaagcaattctcctgcctcagcctcccgagtagctaggactacaggcgcccaccaccacacccgactaatttttgtatttttagtagagatggggcttcgcaacgttggccacgctggtctcgaactcctgacctcaagtgatccacttgccttggcctcccagagcgctgggattacaggcgtgagccaccgcgcccagcctgcagaataatctcgaaacaaccttatgccaatgagacagcacagactcagggcaaagcacggacaacctcgttggacaagagtctgcaaagatacgggcaaaacaggcccacagagacgagtgacttcaccctcgatctaaggaccccctctcatggcagccacttgcccacctgtgaagccaggttggcagacacagtcgtagcggttgatgccatcacggcagactccaaaggtgcaggggttgctggcacagtcgtcaatgttcacttcgcagttcacacctaggggccaggaacatggcatggagtggccaccactgtgccccactagatgcaccattcccaaaccctctgtgcccctccaggtgtgctgtttctgccccagcccccggtcccacctgtggtcccagaagggcagcggcagaggtacttgtccaccaggtctaggcatttgccgccatggcggcagggctggctgcggcattcgtccacctggctctcgcagcgtgtgcccgtgtagccaggagcacaggcacatgagaagctggcgatgccatccacgcagcgaccatggtggcatgggtcaggggagcagtcgtccacgttgcgatcacacagcgtgccctcaaagcctgtggggccaagagggtcaggctccgcccacttgccaggggcctgcccacaagtgaggcctcggaccaatcctggttcagctctatctgaggccctgcccatcaagctgtcaggaggcgagctcaatacaggccccaccccccaccccccacttacttccactccaccccactacaagctccagaatttgtccctagccaagactctcccacagttaaatcccgcccccagctgtggccccacctccagccctgtttctgccccaccctccactggagatgggagcacatggcaggtgccaggggaaggtattgggccctccccattcagttacaggcaccctgtgcccagcccaacactttggctccacacgtagccttatgtcagtctatatgcattattggctccaccccccaactctgtcactgggtcctgccttgctacaaccccgcccccaagctctccccaagtctgttattggccctgtcgcccacaagccccgcctcctgattcttgtcggactgtcattggcccgcctcaccctcggcacagcggcactcgtagccatcgggctggtccacgcatttggcgccattcctgcagggcgtgctggcgcattcgtccacgtccagctgacacgtggagccgctgaagcctggggtggggagtgggatgagcagaggcccagaaagggtgagagcagtacacccctctccagccccgccttgtttgggtggaaaaacccatttacttggatttaaattaacttcaatgtttcataacatatggtttctattgtaagttatccgctaacgtggttttacaggttcccaccctggagtttttgccccttcccagacatgtcttttcgggctccctctcctgaggtcctcacccgaggggcaggtgcagctgaagccattgactcggtccttgcagaccccaccgttgacacaggggctactctgacactcgtcaatgtccacctcgcaataggttcctgtgaagcctggggcagggaatagggcttaggaaagcgggggctaccctatggtgtgaacggggtgcaaggaaggaggtacttcccttcctactcatcgacaaatcccccgagccttcgtccccacctctacactcccagcccaaccttaattttcagccacaggctggactgtcacccagccgtggtcccaactggcccaaggctcatgggtgtccgcagaggccttgccttcaaacccctcctcctctccccagtcctcagactaagccctttccccagtccccagcccccagccccagggccccccatagcctttgcccaggcttactgcaagcttgtctgcaggcttcaccttgacctcacagcagccccgactctgcctctctatccccaaccccttcccgagtgggtcctaaggccaagaatactcccagcccacctgaggttctactgactccatttgaccaagcccccagaatcacacagtattcccttctggtcctgaccccacctccttccaggcttcagtctctaagggtcccactccaaacccacttacaccccattctgctcagctccccatccgcgggcttctctgtccccgccccctgcctcaggacccgcccaggccacgcccaccacccacctgccatacagatacaggtgaactggcctatgcggtcgaggcacgtggcctggtttcggcagggccccgacagacactcgttgacatcggtctcacagcgaggtccagtgtagccacgaccgcactggcacaggaaggagccctgcgtgttcacgcacctgcccaagtgctcgcaggggttggcgcctgccggatggagtgcgatcggtgtgggcgtggctggccgggaccccctcctctcccctctttcccagcccattcacagacgatggagctcccctcaccgatagagcactcgtccacatcctggtcacatgccccacccgtgaagccgggaggacaggtgcaaatggcccggccgttcaccggatttgtgtcacagatagcatcctcgtggcaggggttgctgacacaggcgtcatccaggtgacacaggaggcctgggaagtggtaagcagaagtcataggcagatcttcctgctctgcccaaaaggcccacaccccttgagtattgttttgtcgttgttgttgttttgttttgttttttgagacgaagtttcgctcttgttgcccaagctggagtacaatagcgcgatcttggctcactgtaacctccacctcccaggttcaagcgattctcctgctcagcctcccgagtagctgggattacaggcatgtgccaccacgcccggctaattttttgtatttttagtagaaacggggtttcaccaagttagccaggttggtctcaaactcctgacctcaggtgatctgcctgcctcagcctcccaaagtgctgggattacaggcgtgagccaccgcgcccggcctgttgtttttattaaacctaaacagtatttagtagctgcttttttaatccatttattatgagaactatcaaacatacagaaaagttgaccattcatatacccaccacctagattcaactattgttagcttaatctaccaatcttcttttctaaaccatttaaaaataaattgcagaccgggcacagtggctcacgtctataatcctagcactttgggaggccaaggtgagtgcatcgcttgagttcaagagttcaagaccagcctgggcaatatagtgagacccgtctctacaaaaaatacaaagcttagccgggcatggtggcgcacgcctgtaatcccagctacttgggggactgaggtgggaggatcacttgagcccaggaagtcgaggctgcagtgagctgagatcatgccactgtactccagcctgggtgacaaagtgagactctgtctcaaaaataaaataaaataaattgcaaacatccacatattgttttaaaaccttttgactcttctgattacaaaagggtcctacactccagcctttgcttctgtaataccctctgccatgtatgccctctttctatatccacgttcccctcctaaacatgttctctgatctttgccacttccaaaggtaactcccaggagttccccattccaatggcttctgccctgagccatgcatcagtgcaatgtcagcctcctcccaagcctctcccaggcttacacttccccactaaagctgcctccagcatcatctttttttctctctcttttttgttatacacggtcttacactgtctcccaggctggaacgcagtggctcagtctcagctcactgcaacctccaccttctgggctcaagccatccttcaaccttagcatccagagtagctgggactacaggcatgcgctaccatgcccagctaattttttgtatttttggtagagatagggttttgccatgttgcccaggctggtctcaaactgctgagctcaagcaatctacccgcctgggcctcccaatgtgttggggttacaggcgtgagccaccacacccagcctaccaagtttttgtagagatgacaaaaactcactatgttgtccaggctggtctcaaagtcctgggcccaagcgatcctcccatcttggcctcccaaagtgctgggattacaggcatgagccactgtgcccggcctagcataatcttttttttattttttaaatttgagaaggagtctcactctgtcacccaggctagagtgcagtggtgcaatcttggctcactgcaatctccacctcctgggttcaagctactctcgtgccttagcctcctgagagacttggattacaggtgtgcaccaccacgcgcagctaatttttgtgtttttagtagagatggggtttcaccatattgaccaggctggtctcaaactcctgaccccagtgatccgcccgcctgggcctcccaaagtgctatgattacaggcatgagccactgtgcccagcctagcataatctttctaacactcaagtcagacttcttatttgccctcactaaaaaccatccatggctccctgcagagaaaacggccactcaccagtcttgcccatggggcaggcacagtagaaagaagccacgcggtcatggcaggtggccccatggaagcacacggctgtggcacagtcatcgatattctgactgcagctctcgcctgtccagccattgacacacacgcagctgtggccacccagcgtgttgaagcaggtacccccattgtggcaggcgttgggctgcagctgacactcatccacgtcctccgtgcagaactggcctgtggcacacagatgcagcagtccagccacctggcgcatgtccacccgaggcctgcctccccgctccctctggccgcagtgcccacctgtccactcaggagggcactggcagttataggtgttgacgccatccacgcatgtccccccattgagacatcggtgtcctggacagtcgtccacgttcacttcacaattctgaccctcaaaccctagcagggaagggggcaaggatggtcaccgccgggctggcctgctgtccccacgcccacccctctgactctcctgagtagggctcactcaccaggaagacaggcacagtcgtaagtgaggtcgccactctgcctgcaggtgcccccgttacggcatggtgagggtgcacagggcaccgcggggttctcacatagtggccctgtgtagccagctggacactggcagcggaaggagccaggtgtgttgaggcaggtgccaccatggcggcagggctcacccacccggcactcatccacgtcgcttcggcagctgcggccctggtagccaggtgggcaggagcagaggaagcgtccatcgggccccactgagcagcgggcaccgtgggcacaagggctgctgaggcagggatctggcagggagcagtcagggcctggagggaccaggacagggtgagtttaggactgaccacacccccgactacctcccctccagactcttcccctctcacctcggaagccacgggggcaccggcatgagaatcgggcggtgccagccaccactgaactctggcagacaccacggccagcacaggggcctgagtgacaggggtcctccagctgacaccgctcacccacccagccaggcgggcacctgtgggcagagatggcttggttgggcagcacagggcaggatggccccagacacaaagatacacacaagacaggcaagaaacacgcagggaaacagagcagcaaacacacatttgctgggagcagtggctcacgcctgtaatcccagaactttgggaggctgcggcgggcagatcacttggggtcaggagttcaagaccagcctagccaacatggtgtaaccccgtctctactaaaagtacgaaactttgctgggcatagtggtgcgtgcctgtagtcccagctactcaagaggctgaggcaggagaattgcttgaactcgggaggtggaggttgcagtgagccaagatcgcgccactgcactgcagcctgggtgacagagtaagactcggtctcaaagaaacaaaacaaaacaaaacacacattcattcatgcaacgaatatttactgagtacctactacgttctgagcaatacaaatacagcaacaaacacaatgaaaggggtccctatccctctggatccttgcagccaggtccaggcaaggagaacatatacgaataacaaattaatatacaacatgctggcagggggcggtgaaagccatcagaaccatgaaggatgtagtcagttgggtcacagcccctgaaaagatgacatccatgtcccagaacctgtgactaggaccttactttttttttaaatggctctttgcagatgtaattttttttttttaagagacggagtcttgctctgtcacccaggctgcagtgcagtggcgcgatcttggctcactgcaacctccacctcccggggttcaagcaattctttgtctcagcctcctgcgtagctgggagtacaggcacacgccaccaggcctggctatgcagatgtaattaaatgagagatgtcaagatgagattattctgaattatccacctgggccctaaattcagtgacaagtgttcatacaagagaacggctcacaactgtaatcccaacactttgggaggtcaagacaggataatcacttcaagccagaagttcaagatcagcttgagcaacatagggagactttttttccacaaaaaaaaattaaaaattataaccgggcatggtggcaggagcctgtaatcccagctactctggaggctgaggcaggagaatcgcttgaacccaggaggcggaggttgcagtgagccgaaattgcaccactgcactccagcctggttgacagagggagactccatctcaaaaaaaaacaaaaaacaaaaaaaacaaacaggccaggcgcagtggctcatgcctgtaatcccagcactctgggagactgaggtgggcggatcacgaggtcaggagttcaagaccagcctggccaatatggtgaaacctcgtcgctactaaaaatacaaaaattagctgggcgtggtggtgcactcgtgtagtccccgctactcaggaggctgagacagaagaattgcttgaacctgggaggcggaggttgcagtaagccgagatcgtgccactgcactccagcctgggtgacagagagagactccacctaaaaaataaaaataaaagattagctggccgtggtggctcacacctgtagtcccagcttcttgggaggctgaggtgggaggatcgcttcagcctgggagttgaaggctgcagtgaactaagattgcaccactgcactccagcctgggtgacagagcaagactctgtctcaaaaaaagagagaggcagccaaaaggagatttgggtgggagaaggaagagaagaagacagagacagggactggagtgagacagccactagctgagaaacgtctggagccaccagaagctgcaagagtcagttctcccctgggtccccatggagaggctcagccctgccgatatcttgatttcagacttccaacctccagaacttcaagagaataaattactattgttcaagctacccagtttatggtaatttgttagagcagccgtaggaagctaaaccacagggttaagggggatagaatgatggggtcaaggaggtggaattctattttcacagacatatgaaggtaaggagggggccatggggctttctggggaacggcattccaggcagagggaacagcaaatgaaaagtctcagacccatgtccaagcgcggtggctcacgcctgtaatcccaacactttgggagaccgaggcaggtagatcacctgacatcaagagttcgagaccagcctgaccaacatgaagaaactccgtctctactaaaaacacaaaaaatcagccaagtgtggtggcacatgcctgtaatcccagctactccggaggctgaggcaggaaaatcgcttgaacccaggagatagaggctgcagtgagccaagatcgagccactgcactccagcctgggcaacaagagcgatactcgatctcaaaaaaaaaaaaaaaaaggaaaaggaaaaaaagaagtctcagaccccaggacacaaccacgcaggcacacacagacaggcccagaaaccacagctacacacacagagggacacaccaattggacgccatggcctggccagcactcaagacaccaacccacagcatcccacgcggaaatgagcaactctcactcacagggacagacagcagggctcccacaaaccctcaagtcccttctctgggacttatatagcctcttatgcagggatgggagggtggagggttggggtactgacaccactgttggtaccctcatcttgggggggtggtccttcaacctgcagccccctccccaagcccaccaaggagtgtgaggaattggaactgggaggggttggtcttaagactggaaatctccaaggggcactagcggggtcagagggaggggcttagagaagccagagagtccaagctccgccccccgacgctgccaaccctcacccccctctatccccccaccctccgcccctggcgcggttgtcctccctccggcttgtcccagacgcctgagactgaactcaacaagcggctgactcagtccttagcgtcacccgcaagatcccccccaccccggcccccagcgaaacaggtcggggcacggccgagcaagcaagggtgcgggtggcgttgggaggggagggcacagctcccgtcccctcctccaaggcccgcagggcgaccactgcggccccgaccgcgcgtcgggagggggcgcgctgcgctgggcgccgaggatagctggtcccaccgccaggcagggcgcgacccgcgcgggccccctcccgacgccccgggcgggttcccacgctctgcgtcccgcgcccccgccgaccggtcgggccggttccagccccagcccgcgccccgccccacggcctaagctttgggggagacggaggggggagcgcagacctagttagggggggcacggcgggtgaggcgaggactaggagatggggacgaggtctatggaaacgtctgctgccggtgggggggtcttgggggatccatgggtggggtgacagcttgggggcatccttgaaaggacttgagtatttgagaccgtgaaagagactcgtggggggtggagggcgtgtagggagtggttcccacagcccaactcggaggactgagcccgctccactccgggcgatccgggctccgggcgccgcgcgcgccggtgattcacctgtcgaagggcggggcagccgcgggctcattcacctgtcggcagtattccaggcgcggagctccactgcgcaggcgcccggccccaccgctcgccctcccaggtgtgtggctccaggtaaggtcacacttttccccatcccgccccaccttcgcagaccccccagccccaggaaaccctctcagtcaggctcagccctccacaaaggtgagcccgagtgggagatccagccaaaataaatgtaggtgtaacttcaaagcggctcttcttggtctaaaatcaccccagacccacccagcttgggcctgacccagtacttggcacacatgatgctgaataaatgaatacattaatgagtcaatcaatggctactgcgtgaactgctgttattaatgatagcatgaaaggagccaagcatttcctcataaccttgagagacttctccttagagcacctgtttcctgcctccctaccattattatttataataatgcctatgttgagcacatactatattctgagcacttaatgtatgttgagtgcatacaggagttattattgccccattttccagatgcaaaaactgaggctcaaaaagcttgaatgctcaaggtgtcccagaccccagaatttaagctgagctctttctgtctctgctcagctccttcccagcctctgctctgctccctgcaacctcttgcctttccttgtgatatctaacaactaaattgttaagtcccttcacagtcgccagtgaagcattccctatttcacaggtgcaatgatgatcagagagggaaagtgactagcccaaagtcacactgcaagtaagtggcagtgtgggactgtattataggcctcctatgtccccctccactaaatgttgagagatgggaggggtgtggagggtgtgagccactgcgattggtccctgatagtttgttgattgaataatacctacctcatggggggctttacatgtgacctcaggtggccaagaactgtgaagctgggattactgggcccattttgcagaccatgacactgagatgtaaagagtttaattcctagccggtcagcaacatgatgtgggacttgaacccatgccaagaagagtgcagagcccctgctcagtttccaatggggaaacacgagaggttgcccaagccacacacatgtaggaagtggtagagacatccatggtgaacacagaggcagagggagaagacaaatcgcccctcccccccgcccccacacacagggcccactggtggctctgagccaggcactcacaggcaggcagcctcccgggagggcagctgggtgcaacgacctccatttgcacacgggcttccgtccaggcaagggggggctgtgtgggggtgaaggaaggtggaggatcagccaggtgcccaggaaccccaggcccaagtgacaaaccccctccctccctccaccaggcaacagctgcatggggatgggggcgtctctgcgggtgcagggagtccccccatccacagttcccacgccccccccccccccgccccagccccagctgttgaggctgcagctgtccctgccagctcgagccctgggaaccacaaagcaggggaaggcaggaggaggggctgtcttatgccagatgtgggggctcgggaagctgccagagctaagatgtgcagaatggggtgtgctgagacaggaagtaagggtgctgagtgttacagggaggtctggggcttcatgcccaggttcaggggtaatagaaggggaaggggcaggggatc

SEQ ID NO: 595 - DNA, 3020 bp, Homo sapiens
cctccaggtcctggcgcacagggtgggagcgctgcgctgcgccgcgctgcgcatcgcggcccgcttgccgcctgccccctgccctagctgggccacctccccgggctgccggtggagggctaagaggcgctaacgttacgctgtttccggttttccagcgggctctgtttcccctcccaaggcggcggcggctgagcggcggagccccccaaatggcctggccagatgcggcaggtttgctgctcagcgctgccgccgccgccactggagaagggtcggtgcagcagctacagcgacagcagcagcagcagcagcgagaggagcagcagcagcagcagcagcagcagcgagagcggcagcagcagcaggagcagcagcaacaacagcagcatctctcgtcccgctgcgcccccagagccgcggccgcagcaacagccgcagccccgcagccccgcagcccggagagccgccgcccgttcgcgagccgcagccgccggcggcatgaggcgcgacccggcccccggcttctccatgctgctcttcggtgtgtcgctcgcctgctactcgcccagcctcaagtcagtgcaggaccaggcgtacaaggcacccgtggtggtggagggcaaggtacaggggctggtcccagccggcggctccagctccaacagcacccgagagccgcccgcctcgggtcgggtggcgttggtaaaggtgctggacaagtggccgctccggagcggggggctgcagcgcgagcaggtgatcagcgtgggctcctgtgtgccgctcgaaaggaaccagcgctacatctttttcctggagcccacggaacagcccttagtctttaagacggcctttgcccccctcgataccaacggcaaaaatctcaagaaagaggtgggcaagatcctgtgcactgactgcgccacccggcccaagttgaagaagatgaagagccagacgggacaggtgggtgagaagcaatcgctgaagtgtgaggcagcagccggtaatccccagccttcctaccgttggttcaaggatggcaaggagctcaaccgcagccgagacattcgcatcaaatatggcaacggcagaaagaactcacgactacagttcaacaaggtgaaggtggaggacgctggggagtatgtctgcgaggccgagaacatcctggggaaggacaccgtccggggccggctttacgtcaacagcgtgagcaccaccctgtcatcctggtcggggcacgcccggaagtgcaacgagacagccaagtcctattgcgtcaatggaggcgtctgctactacatcgagggcatcaaccagctctcctgcaaatgtccaaatggattcttcggacagagatgtttggagaaactgcctttgcgattgtacatgccagatcctaagcaaaaagccgaggagctgtaccagaagagggtcctgaccatcacgggcatctgcgtggctctgctggtcgtgggcatcgtctgtgtggtggcctactgcaagaccaaaaaacagcggaagcagatgcacaaccacctccggcagaacatgtgcccggcccatcagaaccggagcttggccaatgggcccagccacccccggctggacccagaggagatccagatggcagattatatttccaagaacgtgccagccacagaccatgtcatcaggagagaaactgagaccaccttctctgggagccactcctgttctccttctcaccactgctccacagccacacccacctccagccacagacacgagagccacacgtggagcctggaacgttctgagagcctgacttctgactcccagtcggggatcatgctatcatcagtgggtaccagcaaatgcaacagcccagcatgtgtggaggcccgggcaaggcgggcagcagcctacaacctggaggagcggcgcagggccaccgcgccaccctatcacgattccgtggactcccttcgcgactccccacacagcgagaggtacgtgtcggccctgaccacgcccgcgcgcctctcgcccgtggacttccactactcgctggccacgcaggtgccaactttcgagatcacgtcccccaactcggcgcacgccgtgtcgctgccgccggcggcgcccatcagttaccgcctggccgagcagcagccgttactgcggcacccggcgccccccggcccgggacccggacccgggcccgggcccgggcccggcgcagacatgcagcgcagctatgacagctactattaccccgcggcggggcccggaccgcggcgcgggacctgcgcgctcggcggcagcctgggcagcctgcctgccagccccttccgcatccccgaggacgacgagtacgagaccacgcaggagtgcgcgcccccgccgccgccgcggccgcgcgcgcgcggtgcgtcccgcaggacgtcggcggggccccggcgctggcgccgctcgcgcctcaacgggctggcggcgcagcgcgcacgggcggcgagggactcgctgtcgctgagcagcggctcgggcggcggctcagcctcggcgtcggacgacgacgcggacgacgcggacggggcgctggcggccgagagcacacctttcctgggcctgcgtggggcgcacgacgcgctgcgctcggactcgccgccactgtgcccggcggccgacagcaggacttactactcactggacagccacagcacgcgggccagcagcagacacagccgcgggccgcccccgcgggccaagcaggactcggcgccactctagggccccgccgcgcgcccctccgccccgcccgccccactatctttaaggagaccagagaccgcctactggagagaaaggaggaaaaaagaaataaaaatatttttattttctataaaaggaaaaaagtataacaaaatgttttattttcattttagcaaaaattgtcttataatactagctaacggcaaaggcgtttttatagggaaactatttatatgtaacatcctgatttacagcttcgg

SEQ ID NO: 596 - DNA, 2010 bp, Homo sapiens
atcaagagcgggaagctgagccgagagctggactttgtcagccaccacgtccgcaccaagctggatgagctcaagcgacaggaggtgtcacggctgcggatgctgctcaaggccaagatggacgccgagcaggatcccaatgtacaggtggatcatctgaatctcctgaaacagtttgaacacctggaccctcagaaccagcatacattcgaggcccgcgacctggagctgctgatccagacggccacccgggaccttgcccagtacgacgcagcccatcatgaagagttcaagcgctacgagatgcttaaggaacacgagagacggcgttatctggagtcactgggagaggagcagagaaaggaggcggagaggaagctggaagagcaacagcgccggcaccgcgagcaccctaaagtcaacgtgcctggcagccaagcccagttgaaggaggtgtgggaggagctggatggactggaccccaacaggtttaaccccaagaccttcttcatactgcatgatatcaacagtgatggtgtcctggatgagcaggagctggaggcactcttcaccaaggagctggagaaagtgtacgacccaaagaatgaggaggacgacatgcgggagatggaggaggagcgactgcgcatgcgggagcatgtgatgaagaatgtggacaccaaccaggaccgcctcgtgaccctggaggagttcctcgcatccactcagaggaaggagtttggggacaccggggagggctgggagacagtggagatgcaccctgcctacaccgaggaagagctgaggcgctttgaagaggagctggctgcccgggaggcagagctgaatgccaaggcccagcgcctcagccaggagacagaggctctagggcggtcccagggccgcctggaggcccagaagagagagctgcagcaggctgtgctgcacatggagcagcggaagcagcagcagcagcagcagcaaggccacaaggccccggctgcccaccctgaggggcagctcaagttccacccagacacagacgatgtacctgtcccagctccagccggtgaccagaaggaggtggacacttcagaaaagaaacttctcgagcggctccctgaggttgaggtgccccagcatctgtgatcctccgggaccccagccctcaggattcctgatgctccaaggcgactgatgggcgctggatgaagtggcacagtcagcttccctgggggccggtgtcatgttgggctcctggggcgggggcacggcctggcatttcacgcattgctgccaccccagatccacctgtctccactttcacagcctccaagtctgtggctcttcccttctgtcctccgaggggcttgccttctctcgtgtccagtgaggtgctcagtgatcggcttaacttagagaagcccgccccctccccttctccgtctgtcccaagagggtctgctctgagcctgcgttcctaggtggctcggcctcagctgcctgggttgtggccgccctagcatcctgtatgcccacagctactggaatccccgctgctgctccaggccaagcttctggttgattaatgagggcatggggtggtccctcaagaccttcccctaccttttgtggaaccagtgatgcctcaaagacagtgtcccctccacagctgggtgccaggggcaggggatcctcagtatagccggtgaaccctgataccaggagcctgggcctccctgaacccctggcttccagccatctcatcgccagcctcctcctggacctcttggcccccagccccttccccacacagccccagaagggtcccagagctgaccccactccaggacctaggcccagcccctcagcctcatctggagcccctgaagaccagtcccacccacctttctggcctcatctgacactgctccgcatcctgctgtgtgtcctgttccatgttccggttccatccaaatacactttctggaacaaaaaaaaaaaaaaaaa

SEQ ID NO: 597 - DNA, 8005 bp, Homo sapiens
tgctgctcctcggctgcggatacctcgcccatgttctggccgaggttggtgccgcccccgcgccccgtccctcggcggctcctccggcgcacaccccccgccggctggggcgccacgggctctgcagagagcgttttggttcctgccagggtggtcgatgtttagattttcccaactgggttctattttctgccatgcctaagtgtgtgtggggagtttccagcgtgttgcgtcggtcgctctgcctcggggggaccggggagcagcgaggtggacgagtggggagaaacttcggggggcgcagtgtcctctccggggaaggggagctggggccaggcgggcgctgcagcagcggggtgcgggagcggggaagggggtgtgtgtgagccggcggagcctggggaggagagaagggcggcggataaataggtaggggcggctgctgcggaacgccctggccgggcagggtgggcagcgcaagctgcagccctcggttcccagtccccaagcccggcggctcagggccggcgcagtcccgcccgcccgggctgcttacaggtggctgagcgaggcagctgggctgggccaggcgtccgaccctcccaccgcggcgtccccgccccccatccccatccccatccccatccccgggagctttgctgtgatgaatgactttccacagcccccgtcgtgggaacttagtgcttcaggctccccagcgacccccgactctccttaaaaatcggggagggggagtgggggaggccagaggtgagggtggtctccgcagggcacggagagctgcgcgaggtggaagtttaaccctcgctttccctggaggcttcttctcccggccgccggctggatttgggcgtcttagtcggcgctagggcccggctgggcgagccggggtggggcgagtgtgtgagtgagatgtgtgtgcgcgtgtgtgtgtctgcgcgcgcgtgctgtgtttgtgagacggagagacctctccacgggttcggcccgggattccgggcgtgaaatttaagccctgcctggattaaagtgttagggctgccgtgactctcgccgacccgtgacgcattttaacttgatctttctagatgttgatctcactattaaatcagaaactttcggccccctcgctgccccctagaccttctgtaactgacaccccgggtggaggggccggagtgcgggggcttttgtctgaaaatataaaggggggggggctttgattttgcaaagggcggaacatggatgcgggtggagaatttggggtctcttccagccccacccccggacttctggttccagggccggggcgagggctccgcgggggctggggcggggactcggccggcgctcgcggggtctcctcgggcccggggcggcggcgctcctggcggccgggggcgcgtgccggcggggtcgggccgcgggcgctgaccgtgtggcctctgcttgcaggaagccgagatcccccgcgaggtgatcgagaggctggcccgcagtcagatccacagcatccgggacctccagcgactcctggagatagactccgtaggtaaatcgcgccccttccctccgcgcgcggggagggcgcgggcgggcggcctgtgcgcccgagctggggccgggcggggcgccgccaggagcgcaccgaaaggtcagaatccaatccccagccataagcgcccgggcggatgagtcaggagtttctcttccagtctcccacctttctctcccagcggcggccgagggctgctcgctcgccccgggattgttttcgcctttaaggaaaacgccgcgtgtgtcacacaaagttcagccgcgcctccgccaggtgtgcgggccccgcgcctgccctcgggccgggggagcggcaggatccggcccagaccctgggcgcagagccctggcccgtgcgcgggggcgcagcccgcggagggaggcccaagggcaggcgcggctcccggtccgacgggcgggcgggcggaggcggccccgggtcagcccggccccctctgtaatccctgcgagctggtgccgcgttcttgcgcagggctgggcctctgtggctgcagaagccggtgtctttctgttttcacgacccaatgaaaagccttggacgcatctgctgcctgggggctatttttgcggctcaccctcggccctgggccgggccactagagaacacagcttgtttgcaagcacagagttttgctgcgggttggcaagggttaaaggggcctctcaccccgggggaccccggtggaccacgggtgggtgggaggggcgagggtgtagggtggccgcccgcccgctcagggctagagagccccttcctagaaggcgaggtctctcttccaggcgtgcgtggcgctcttttcaaaatgagcactcggcctgggaactccagtcggagccttaacctggtttaaaaaggggctctgcgataaacttgctaaaaagagtaactaaaggcagcagaattggaagaagttacgtgacatgaagattcttctctccctgcaaaggactctgaaaaagggggggcatgcggggattaagtgaaatcacatggtctagtcatttggaaatttgtacctaattatggtggtggagaggcctgaactattttcgtttcatgccaaaaccattttctaacaaggccgatggtttctgtagtttcttgacccaggaaatccctgggctgatccttatcgggggcggagggtggggggtgcggtagagtttcactcccacagcacagctgggcgggggattttgaccggatccctcagtggataactctagggaaaaggatctggctctggtttgtgggggggaatcccttgcctgaatctcgctggtcctggatgggtttggaaaagtgggggggggggggctgcttcctggagaaggtttcagggctttttctggggggggggtgctagcagaaggggaggcttgtggagagctgggcctcctcgtgggaactggctttggaagctgcagggaaatgggccattcactttctgctgggactattcttattctggtcttggcgccccgcctcctccacccccacccattatcgcctttagcattgcagcttcgtggggtatgctgatggcattcctcacccgggggcttctaggtcgtagggtccgaacagaaaaaaacaaggatgcccctaagctagtcctggccggtttcaaattccctctgcagtcatgtcccaggagctctctcctcctgccccagggaatgcagagtggatctcagccctcctgtgtccgtgagaggttttggggtctgaataggattctcctagtgtctgggaggctttgtgtgtgagaatatgggggtggcatctacctcctctcttgccctggtgggggaccttttgtaacataggggggcctccttggtcctgtccagtcccctccccaggtgtggctgaaaacagaaccagagaaacccacagtctctcgcctgaggacaggagaggcaccggctgctcctccagcttgtagggggtgtcttttcttcaactcccgttctctgtcgtagggagggttgtaaactggttgaggtcagttctcattgggtaagcatcctccgggtcctggactcccttttcaatccagaggtgcttctggtctgttaggggcaggggacagtgcaggggctcatgaggaaggggctgggtgctgggagaaacccaacgcaacgaactttccctcggagtccctttataacccttccaggctgatgttcttggcattaggtgcctctaaggcccacgctgtaggaagcagaaaagaggctttgaggaatcccaggggtgcgccccagctatgctgactcctcctccaggtgggtggggctttgtgactggcatttggctcctcccagcatgcaggctgcgtcccactgtacagttggggagactgagccaggcaccgtcttggccgctccttgactgtggctggaggagcacgggtagtgggattcctcaccatcctcccggagcccaagcgtttcattcggagggtgtgctggagtgaagagtgaaggcttttcacctgtggcttttagatccagaggccagcatgtggtcttttaatgaccggcagcccgcgtttagggcctgtttgtcctgtgtgcagtggcagctggggagctttgttccccaaagtggtctggcctggcgcccgtggttcattgagcggctgataacataaatagccccatctcgggccagtaatgccagaccaggactgatggttgggagattctccctgtcctggagttgtccttggacatctgtgcctaaaagacaaaagggaaagcctcctggttaactgtcctgggagcagttttaggggtgattcttgccggccaggccacctgggcctgggctgctcagagctgtgtttggtgagctgtgggcggctttggtgagcgtggtccactctcggcatcttgagctgggagcaaagggtgggcttggtagactgggagctattccccctctgtcccttgtctcaagaaatttgccagctcaggctttctgggggtcaatgagctagcacggctgccgtcttctctgtttattaagccagggctagagggtggcggggcacggggactgtgctctgtggacgcagaccacatgagtctcctgcgagccacttctggtcctgttatatttctctgggcctcagtttcctcggatgtgaagaagtgatagcacccaccgcacactcagaagctaagtcattggtaaagcagctaatgcaaacgtggctatcacaaggcatccgaaaatgggagctggtgttattgaattttctcctacgagtggagaacggacccgttactctttggtttggccatggcaagatggccaccaccaggatgtgattcataagtgtcactttttcatgaaaagaaatgctgcttgtaacagttggttgatgggaaattcttactgcatgagtagttctgttctgatcttattttgggtctcaaaaaaattagtgtcattggaacattgagtcattttcggtaaaaagttgggctccgggcgagcttcgtctttgcctgacaccttctgtgaggtttgcgggcttcattttaaatccgcaggctcctcgggggtgcggaggaagctgaggtttctccggttggtttgtggatagtcacggatgcctcggtgggctggggagagacactttgggctgctagtcctgaacccaggaggtgcagagacccattagccgtctgggctggtgaccgggacttcccaagcttcccaggagggggcagggagatctctgtgcctctggagcatcctggctgtgaggctcactgtctccgcgcctgttcacccttggttatatggtggggggggggcaggatggagggagatgggaagagaccccccagctgggaccaggggccaaggcaaggaggcccagagccacccgcggtgcccaggtgcgggcagtgtccatgggcaggactgtgggtcctctccctactgcgggatttggagagacctgagactcccccagcctgtctgctgtagccgtcagcgcctgtgaaggggtggtgtgtgcagctgggtggggtggcggggataggttctcagttctgctccccggtcagtgctggtcttggctctggccactgccccacctgcacctggccgcctggctgtaaacacggctcgcagatgccagcttctctcaacccctctccgcaggccgcctccctctgtcaggctgcgggaactcctccgtgtagcctccacgagaggccacgtgccctcctgcctctcctcatgccgctggccctagagtagactcatttcaggaatgagtggggtctggcccgcagcccagtctggcggcttccagtgcccctcagaggttaggccacttcttccaggagtgctttagtgagggggagggagggagacgtacaggcacctgcagaaatctcagcggcctctggcttctccctcgctccagcccccagacagaggtggggcctggcttagccctgtgcccctcggggaggtgcacggagctggggtctcaggcccctcctgccccggggcagccctcacctgggctaccttggaggaggcaccgtaggggagaccacctgcaacctcttccccgaagggccctgcgcttcgtcacgggcccctgaatgtggggacctctgtgctaacggggcgttttctgcggtttccagtgtttcatgccctgcatctctggaaagccctggtgggaatcgaggttctcctggagggacaccacataatggcgggagctgtgaggggctgtgccgccaggtgcctgttccccagtggctcccaaagctggtctgtgggaagtgcggctggacaggcccagggcacagcgcacgggcctggggcattcacggtgttctccttccgcctgcagggagtgaggattctttggacaccagcctgagagctcacggggtccacgccactaagcatgtgcccgagaagcggcccctgcccattcggaggaagagaagcatcggtgagtccaggaggccgcgatgggcagggcagggccgggtcggggtgagtccaggaggccgcgatgggcagggcagggccgggtggggaggagctgcccgctctcccagcgcagtggcctcaggcaagccacccgttccctcctccctaaaataggcctggccctggtcgctctggctccctgtgctcccgaggcctccctccttcgagggtgtctcctgccccagcccgcctgctcctcctggagtcctggtctgggccaagagagcttccaggagagaagagccatcataaattccttaagcgccctgtcttgtcggggcctgtccccaggagccttgccggaaacgtggtcgcgcctaatttccaattcgcagtgtgggcatcgtgctcctgcgccggctgctgaactggtggggacgcgcgtgctgtgtccggcggctgccccccggcaccctcaccacacccgtgtaccccgccccactcacacctggctccagggctccacccccgcgtccatttgggggatattttgtcccttcttacaggacagccccatggccctccagccccctgaggaggaactagcaggtttggggagttcaggggccagtccctgctttctacccaagtccgcgtcctcggggtcccacctgatgggtttgagccctggtgctgctctgctctggggccctgagcagtgacccccctctctagctgtggtttcctccatgaagatggattttgtatcttccaccttaaagtgtcatgtgtggctggctagtcccagctgagcagcaggccctcccaggtgacattgctgtgggtctgcatttgcacccttcagaccacttttgaaggctagagcatgcagcaagtgctgtaggattcactgttaaggccccctcctcccccagccactggccccacctggactaggttcccctctgcccctccagccactggccgcacctggactaagttcccctctgcccctgccacccccagtctctggccccacctggactaagttcccctctccccacccccagccactggccccacctggactaagttcccctcccctccgaccactggccccacctgtccaggtccctccagcctgcaggcaccgggctgggctcctctggatgtgtggtgctcctgcccacccagcccctgagcctctgctcccagctcagcctctgctgcctgggaggaatcctggcctgtggcttaccctggttgccccccaggcccagctggagccgcctcagccctggggtggggccgtggtcgcagaggccggtccccgctcactgtgcccccgccgttgcagaggaagctgtccccgctgtctgcaagaccaggacggtcatttacgagattcctcggagtcaggtcgac

SEQ ID NO: 598 - DNA, 2034 bp, Homo sapiens
atgggagactcccacgtggacaccagctccaccgtgtccgaggcggtggccgaagaagtatctcttttcagcatgacggacatgattctgttttcgctcatcgtgggtctcctaacctactggttcctcttcagaaagaaaaaagaagaagtccccgagttcaccaaaattcagacattgacctcctctgtcagagagagcagctttgtggaaaagatgaagaaaacggggaggaacatcatcgtgttctacggctcccagacggggactgcagaggagtttgccaaccgcctgtccaaggacgcccaccgctacgggatgcgaggcatgtcagcggaccctgaggagtatgacctggccgacctgagcagcctgccagagatcgacaacgccctggtggttttctgcatggccacctacggtgagggagaccccaccgacaatgcccaggacttctacgactggctgcaggagacagacgtggatctctctggggtcaagttcgcggtgtttggtcttgggaacaagacctacgagcacttcaatgccatgggcaagtacgtggacaagcggctggagcagctcggcgcccagcgcatctttgagctggggttgggcgacgacgatgggaacttggaggaggacttcatcacctggcgagagcagttctggccggccgtgtgtgaacactttggggtggaagccactggcgaggagtccagcattcgccagtacgagcttgtggtccacaccgacatagatgcggccaaggtgtacatgggggagatgggccggctgaagagctacgagaaccagaagcccccctttgatgccaagaatccgttcctggctgcagtcaccaccaaccggaagctgaaccagggaaccgagcgccacctcatgcacctggaattggacatctcggactccaaaatcaggtatgaatctggggaccacgtggctgtgtacccagccaacgactctgctctcgtcaaccagctgggcaaaatcctgggtgccgacctggacgtcgtcatgtccctgaacaacctggatgaggagtccaacaagaagcacccattcccgtgccctacgtcctaccgcacggccctcacctactacctggacatcaccaacccgccgcgtaccaacgtgctgtacgagctggcgcagtacgcctcggagccctcggagcaggagctgctgcgcaagctggcctcctcctccggcgagggcaaggagctgtacctgagctgggtggtggaggcccggaggcacatcctggccatcctgcaggactgcccgtccctgcggccccccatcgaccacctgtgtgagctgctgccgcgcctgcaggcccgctactactccatcgcctcatcctccaaggtccaccccaactctgtgcacatctgtgcggtggttgtggagtacgagaccaaggccggccgcatcaacaagggcgtggccaccaactggctgcgggccaaggagcctgccggggagaacggcggccgtgcgctggtgcccatgttcgtgcgcaagtcccagttacgcctgcccttcaaggccaccacgcctgtcatcatggtgggccccggcaccggggtggcacccttcataggcttcatccaggagcgggcctggctgcgacagcagggcaaggaggtgggggagacgctgctgtactacggctgccgccgctcagatgaggactacctgtaccgggaggagctggcgcagttccacagggacggtgcgctcacccagctcaacgtggccttctcccgggagcagtcccacaaggtctacgtccagcacctgctaaagcaagaccgagagcacctgtggaagttgatcgaaggcggtgcccacatctacgtctgtggggatgcacggaacatggccagggatgtgcagaacaccttctacgacatcgtggctgagctcggggccatggagcacgcgcaggcggtggactacatcaagaaactgatgaccaagggccgctactccctggacgtgtggagctag

SEQ ID NO: 599 - DNA, 496 bp, Homo sapiens
ttttttttttttttttttttgtttgtcagactgaatgttttatttcaacagacatccctggtttaaaaaaaaaaaagtggtggtggggagggttcaacattttatcacacctgacagagagcaaaactcccaccccagaactcagagccccttcggaggcatcacacaagtctttgctagctccaggacagaaaggagctgaattttctaacttgttaagaaaaatctatcaaatatgttcattctcgcagaggccgaggcctgggtccttggggaaagagatcctgggcttagtatcaggggagccatccgagggtttgcgggagaaggcatggggcaggagcaacctgttagtctctttcacagtcaggtttttaggttggggaagcaaggcagacaaaccagtcccctacactggatccctgaaggatagttttcttctttgtgggttcatcttcccagaatctgaatctcccttatgaaactccgggcccgg

SEQ ID NO: 600 - DNA, 7273 bp, Homo sapiens
ggtacccaggctggagtgcactggtgtgatcatagctcactaacctcgaactcctgggcttaggcaatcctcttgccttggcctcccaaagtgccaggattacaggcatgagccaccacagtggagctctcaattctgatactaataatttgtgtcttctctttttttccttagcctgactagagtaattaactttatgtcttttaaaagaaccacctttttggttttacccattttcttttttgattttctgtttttgatttgattgatatctactctaattttttattatttcttttcctctgcttactttgaatttaattacttttcttttttgtagtctcctaaaatagaagcttatattattgattttagatctttcttcttttctattacagcactcaatgctataaatttccctctaagcattgctttcactgcatcctacaatatttcaactctattgttatttagctcaaaagaggttcttaatttctattgggatttctctttgacccatgtgttattcagaagtgttccgtgtgatctccaaatatttgggagtttttcagctatctttctattaatcatttcttgtttaattctattgtggcctgagagcatatattgtatgatttatattcttgtaaatgtgttaaggtgtgtcttatggtgcagaatgcggtttatcttgctatatgttccttagagaataatgtatgttctgctgttattggataaagtagtctatagatgtcagttacatctcgttgattaatggtgctgttgagttcagctatgtcctaaatgattttctgtctgctgtatctgtctatttctgacacaaggctgttgaagtctccaaccataataatgaattaatctatttttctttgcagttttatcaattttgtcttatatatattgatgctccattgtttggcacatacacattaagaattgttatgtcttcttggagaatttacctttccataacatgtaacatttccctttattcctgataatttttcttgctcaaaagtttgccctgttggaaattaccagaactactctggctttatttgattagtgttagcatgctctctctttctctattcttacacttttaatgtatacttgactttgtatttaaagtggggttcttatagaaaacatatacttggtagggtgggaagtaaaataaaaagaaatacttgggtattggtttgatccactctaacaatctctatgttttaattgatgtatttagaccattgatacttatttttttatcctcatccctgtgattacccagagagctgcttaaattgattattgatatagacaaattaataattaatatctaccgtttgttactgttttctatttttcattgcccttactttctgctcctattttttgctcctttttctgttaatttaggttttgagttattttatatcattctattttctctcccttctcagcatatgaattatctttctttttgacttttttagtggctgccctgaaggttgcaatgtacatttacaaccagtcccaatctcctttcaaaaaacacaatactgtttcatggctagtgcaagtacctaataataagaagtcactcctaatttctttctctcattctttgtatctttactgttattcatttcacttgtacataagctgtaatctttcaatacattattgctattattatttcaaaacatgttatctattatatctatttaaaataagaaaaataggccaggtgcagtggcttactcatgtaatcccagcactttgggagaccgatggattgctagagctcaggaattcgagaccagcctgggcaacatagtgaaaccctgtctctactaaaaatacaaaaaaaaaaattgctgggcatggtggcatgggcctgtggtcacagctactcgggaggctgaggtgagaggattgcttgagcctgggaggcagaggttgcagtgaaccaaaatcaagctactgcactccagcctaagtgacagagtgagaccctgtctcaaaaaaaaaatgaaagaattatttttatttatcttcacttatttcttctctaatgctctttgtttctttagtatgtagatccaagtttctaacctgtatcatttttcttatctcaataacttcttttaacatttctcacaaagcagatctactggccacagaatgcctcaattttcatttgtctgagaaaaccttatttctccttcacttttgaaagataattttgtagggtacagaattctaggttgtaggttttttcccctcaaagtgaaatatttcattccactcttttcttctttgtatggtatctgagaagaagtcagatgtaattcttatcattattacttaaaagattgcttctgttcctttctctcttctccttcccttctttccttctctgtatattacaccttttatagttgccccatatttcttagatattatgttttggttttcttctgtgtttttttctttgattctcagttttagaagtctctatttatatatctgcaatcgcagggattctttcctctgccatgtccagtctactaataagcccttacagacattgttgacttctgttccagtgtttttgatctctagcatttctctgattatttcttggaattgccatctgtctacttacattaccaacctattcttgtgtgttgtcttatcatagtaattgcagttgttttaatttcataggtattgtaatttcaacatctctaccatatttgacattgattctgatgcttgctctgtcttatcaagctatgtttttgtcttttagtgtgacttctaattttttgttgaaagccaggcatgatgtactgagtgaaagaaactcaatacattgtaatgtgacgataagagttcaggggaagtgaagcattctatagtcctatagcaggtctcggccttttagtgagcctgtgcctatgaacggtgactttcaacaagtgcttttcattccactcttttcctgtccttaagtgggacaagatcactgggggggggctagaattgggtatttcccttctccaatgtagaagctaaagagagggctggagttgggtatttttcttcccctgtatggaaagctagaggcagttaaatttggatattttccttcttctaattcagttaggctgcgacaaaaatcccgacagtttaggctctaatattataaaataatttctcttgagtataggccttattaagaacactatactctgatggagctgagggggagttttctctgatattcactgcgagaacctcgtagagctccaggaagcaaaactcacaaaagtgtgggagtcttccagaatttttcctttgcagacttatctgcactgaacctccagaaattcatcaattacagttcaggttttcctacccaggtactggttttcatggaggtttctgcctgtgcatttctgctccagtaagttgttcttcttgtatggtctgtctttcaaattttttaagtagggttatgacctgtcgcctcacttctctgacagttctgagagtgttgatttttcagtttgcttagatttttacttgtttttaggatgaagtgacaatttccaagctcctccctgacatgccagatcagaaactgaaagtcctaagcctcatattctgtgcgtgggtatgttcacatcctgcctgctccagtgcccccacctcacactctctttcccttccttgtccccttgtgagatttctaggtccaatacaaagactgtgttcaactcattcaactacttggctcatctgagtattataatgaacaatcacaaaaaaaaatgaagtaaaagaaaaatccatcaaagaattgagatatttgagaaaaagaaaggagatcagtgttttataaaacttagaaatagattttttaagtgtttcttcattgacttatgtgaaaggacttttcttaatttaacaaattatgtgctttcgtttatagcctcaaaacttcttgtgtagctaagaatgggtaaataatcaggctttactaaaggactaacgtaaagatcttctgtaagtaacatttctgctactcaaggaagagataaacttcatggcataaccttgccaaagtatactaagaataaccctgacacaaagctcttttttcagccaacatgccatgaaagaaagaagacaaggggtgatctccactctctaagtgaaccactaaacccaccaaagaagaaacgagggaaatagaaagaggacccttgcctgagataatggatctgtatgtatgagtagtagaaccctgctcaaagtacaaggaagggaaaaaaaagttagtttatttggaattttggacattaagagtctttattgttcattttcttttaactcacatgaatggcttatcacttcaattaataaatatttcatttcttttcaatctatattcatgaaacaaatctgaaatgaacagtgcaacatgtgaatgtttagaacattataaaattaaacacaaaatctgtctggcaatcttcctagcatcttaggaaaaaagttgacaaaatttcaagcagcagaagggggcagtaaaactcaacagaaagctctggaagatttttaagattcttccttattttcttttcatgtagagtatttcccaacaaatttcagacgctaatagaaattttgtacaacagatccatatatttgcctaaaatagacacagaaacattgatatatgcaaacatgagagctataagttttacatgatcaaaaccttttttttatggtacacaatagtcacagtacttttccatataaaacaggtttagtggtcttaatttagtttggcacatttaatacactcccatgaccagcatcccaaatgtacctatccgttttattttattgtctcagaattgtcagttatttaataaattatgtaacttttttccttatgctcagatttgcacttctttctaaaactctgcccatccttaaagtcccagattctccttgaacttttttttttgactttccaagtacatggaactcttcactctatcctgctatataagtgacagaatttccactatgggatagatggagttcaattcctttgagtttaaaataatctaaatataattattccttatgccctgtttttccctcacttttgtatccaaatctcttttcagacaacagaacaattaatgtctgataaggaagacaatgatgatgatcacttcaaaataagcttgaattcaggattgtaatgtaaaattttagtactctctcacagtatggattctaacatggcttctaacccaaactaacattagtagctctaactataaacttcaaatttcagtagatgcaacctactcctttaaaatgaaacagaagattgaaattattaaattatcaaaaagaaaatgatccacgctcttagttgaaatttcatgtaagattccatgcaataaataggagtgccataaatggaatgatgaaatatgactagaggaggagaaaggcttcctagatgagatggaattttagtcatccgtgtctcatgaagaatcagatgtgtacactaagcaaaacagttaaaaaaaaaacctccaagtgagtctcttatttatttttttcttataagacttctacaaattgaggtacctggtgtagttttatttcaggttttatgctgtcattttcctgtaatgctaaggacttaggacataactgaattttctattttccacttcttttctggtgtgtgtgtatatatatatgtatatatacacacacacatatacatatatatatttttagtatctcaccctcacatgctcctccctgagcactacccatgatagatgttaaacaaaagcaaagatgaaattccaactgttaaaatctcccttccatctaattaattcctcatccaactatgttccaaaacgagaatagaaaattagccccaataagcccaggcaactgaaaagtaaatgctatgttgtactttgatccatggtcacaactcataatcttggaaaagtggacagaaaagacaaaagagtgaactttaaaactcgaatttattttaccagtatctcctatgaagggctagtaaccaaaataatccacgcatcagggagagaaatgccttaaggcatacgttttggacatttagcgtccctgcaaattctggccatcgccgcttcctttgtccatcagaaggcaggaaactttatattggtgacccgtggagctcacattaactatttacagggtaactgcttaggaccagtattatgaggagaatttacctttcccgcctctctttccaagaaacaaggagggggtgaaggtacggagaacagtatttcttctgttgaaagcaacttagctacaaagataaattacagctatgtacactgaaggtagctatttcattccacaaaataagagttttttaaaaagctatgtatgtatgtcctgcatatagagcagatatacagcctattaagcgtcgtcactaaaacataaaacatgtcagcctttcttaaccttactcgccccagtctgtcccgacgtgacttcctcgaccctctaaagacgtacagaccagacacggcggcggcggcgggagaggggattccctgcgcccccggacctcagggccgctcagattcctggagaggaagccaagtgtccttctgccctcccccggtatcccatccaaggcgatcagtccagaactggctctcggaagcgctcgggcaaagactgcgaagaagaaaagacatctggcggaaacctgtgcgcctggggcggtggaactcggggaggagagggagggatcagacaggagagtggggactaccccctctgctcccaaattggggcagcttcctgggtttccgattttctcatttccgtgggtaaaaaaccctgcccccaccgggcttacgcaatttttttaaggggagaggagggaaaaatttgtggggggtacgaaaaggcggaaagaaacagtcatttcgtcacatgggcttggttttcagtcttataaaaaggaaggttctctcggttagcgaccaattgtcatacgacttgcagtgagcgtcaggagcacgtccaggaactcctcagcagcgcctccttcagctccacagccagacgccctcagacagcaaagcctaccccccgcgccgcgccctgcccgaagctt

SEQ ID NO: 601 - DNA, 1782 bp, Homo sapiens
atggggaccgcccggatcgcacccggcctggcgctcctgctctgctgccccgtgctcagctccgcgtacgcgctggtggatgcagatgacgtcatgactaaagaggaacagatcttcctgctgcaccgtgctcaggcccagtgcgaaaaacggctcaaggaggtcctgcagaggccagccagcataatggaatcagacaagggatggacatctgcgtccacatcagggaagcccaggaaagataaggcatctgggaagctctaccctgagtctgaggaggacaaggaggcacccactggcagcaggtaccgagggcgcccctgtctgccggaatgggaccacatcctgtgctggccgctgggggcaccaggtgaggtggtggctgtgccctgtccggactacatttatgacttcaatcacaaaggccatgcctaccgacgctgtgaccgcaatggcagctgggagctggtgcctgggcacaacaggacgtgggccaactacagcgagtgtgtcaaatttctcaccaatgagactcgtgaacgggaggtgtttgaccgcctgggcatgatttacaccgtgggctactccgtgtccctggcgtccctcaccgtagctgtgctcatcctggcctactttaggcggctgcactgcacgcgcaactacatccacatgcacctgttcctgtccttcatgctgcgcgccgtgagcatcttcgtcaaggacgctgtgctctactctggcgccacgcttgatgaggctgagcgcctcaccgaggaggagctgcgcgccatcgcccaggcgcccccgccgcctgccaccgccgctgccggctacgcgggctgcagggtggctgtgaccttcttcctttacttcctggccaccaactactactggattctggtggaggggctgtacctgcacagcctcatcttcatggccttcttctcagagaagaagtacctgtggggcttcacagtcttcggctggggtctgcccgctgtcttcgtggctgtgtgggtcagtgtcagagctaccctggccaacaccgggtgctgggacttgagctccgggaacaaaaagtggatcatccaggtgcccatcctggcctccattgtgctcaacttcatcctcttcatcaatatcgtccgggtgctcgccaccaagctgcgggagaccaacgccggccggtgtgacacacggcagcagtaccggaagctgctcaaatccacgctggtgctcatgcccctctttggcgtccactacattgtcttcatggccacaccatacaccgaggtctcagggacgctctggcaagtccagatgcactatgagatgctcttcaactccttccagggattttttgtcgcaatcatatactgtttctgcaacggcgaggtacaagctgagatcaagaaatcttggagccgctggacactggcactggacttcaagcgaaaggcacgcagcgggagcagcagctatagctacggccccatggtgtcccacacaagtgtgaccaatgtcggcccccgtgtgggactcggcctgcccctcagcccccgcctactgcccactgccaccaccaacggccaccctcagctgcctggccatgccaagccagggaccccagccctggagaccctcgagaccacaccacctgccatggctgctcccaaggacgatgggttcctcaacggctcctgctcaggcctggacgaggaggcctctgggcctgagcggccacctgccctgctacaggaagagtgggagacagtcatgtga

SEQ ID NO: 602 - DNA, 1369 bp, Homo sapiens
caccgagacgcgccggcggaccgcgggcgagtgcagccggtgacccggcgagaggcggcgccgctcccaagatgtcgcagacggccatgtccgaaacctacgattttttgtttaagttcttggttattggaaatgcaggaactggcaaatcttgcttacttcatcagtttattgaaaaaaaattcaaagatgactcaaatcatacaataggagtggaatttggttcaaagataataaatgttggtggtaaatatgtaaagttacaaatatgggatacagcaggacaagaacgattcaggtccgtgacgagaagttattaccgaggcgcggccggggctctcctcgtctatgatatcaccagccgagaaacctacaatgcgcttactaattggttaacagatgcccgaatgctagcgagccagaacattgtgatcatcctttgtggaaacaagaaggacctggatgcagatcgtgaagttaccttcttagaagcctccagatttgctcaagaaaatgagctgatgtttttggaaacaagtgcgctcacaggggagaatgtagaagaggcttttgtacagtgtgcaagaaaaatacttaacaaaatcgaatcaggtgagctggacccagaaagaatgggctcaggtattcagtacggagatgctgccttgagacagctgaggtcaccgcggcgcgcacaggccccgaacgctcaggagtgtggttgttaggagagcacacaggtgttcatacagtggcatttgggacacaatcgttggaacctgaagaatctgaagttttttttaccaccatctttttctactctgtatggaagtagatctttatggggaaaagagaatttggggtgttctgcaagccagtcaaagtggcacagcaaatcatataaatcgaattaaatggacaacaccgttagatgtgtatgtaaaaattttctgtttcatatttttcctttcactttcggtttaaaacatgctatatgtactgtatgtcctgtagcccagtgcggctccacagcatggaatctgatgtatgatatgatagaatgtggcactaaatgcagtttcagattttattttttttaatcatatgaactaaaattgtcaattgtgaggtgtgcttttctcatcatgttggttatattgcacaattggttatatttatgacctgatattcaaagactctggcattgatagccagtgtgttttcttatttaactccgtttactacattctacatggtgtttacgtgatccacacttgaaatactagatcagtagacattcactaatataccaaaataaaatgaaaaattgagtttttccgtgaaaaaaaaaaaaaaaaaaaaaaaaaaa

SEQ ID NO: 603 - DNA, 2766 bp, Homo sapiens
gactgccggtcgttcggacgtcttgcctgtcgcgtggaggagaggtccgggctctccaggaaggtggctgcggcgacaaaatgaagatattcgtgggcaacgtcgacggggcggatacgactccggaggagctggcagccctctttgcgccctacggcacggtcatgagctgcgccgtcatgaaacagttcgccttcgtgcacatgcgcgagaacgcgggcgcgctgcgcgccatcgaagccctgcacggccacgagctgcggccggggcgcgcgctcgtggtggaaatgtcgcgcccaaggcctcttaatacttggaagattttcgtgggcaatgtgtcggctgcatgcacgagccaggaactgcgcagcctcttcgagcgccgcggacgcgtcatcgagtgtgacgtggtgaaagactacgcgtttgttcacatggagaaggaagcagatgccaaagccgcaatcgcgcagctcaacggcaaagaagtgaagggcaagcgcatcaacgtggaactctccaccaagggtcagaagaaggggcctggcctggctgtccagtctggggacaagaccaagaaaccaggggctggggatacggccttccctggaactggtggcttctctgccaccttcgactaccagcaggcttttggcaacagcactggtggctttgatgggcaagcccgtcagcccacaccacccttctttggtcgcgaccgcagccctctgcgccgttcacctccccgagcctcttatgtggctcctctgacggcccagccagctacctaccgggcccagccgtccgtgtcactgggagctgcctacagggcccagccttctgcctctttgggtgttggctatcggactcagcccatgacagcccaggcagcctcttaccgcgctcagccctctgtctcccttggggcaccatacaggggccagctggctagtcctagctcccagtctgctgcagcttcttcactcggcccatatggtggagcccagccctcagcctcggccctttcctcctatgggggtcaggcagctgcagcttcttcgctcaactcctatggggctcagggttcctcccttgcctcctatggtaaccagccatcctcttacggcgcccaggctgcctcttcctatggggttcgtgcagctgcttcttcctacaacacccagggagcagcttcctccttaggctcctacggggctcaggcagcctcctatggggcccagtctgcagcctcctcactagcttatggagcccaggcagcttcatataatgcccagccctcggcctcttacaatgcccagtctgccccatatgctgcacagcaggctgcttcctactcttcccaacctgctgcctatgtggcacagccagccacagctgctgcctatgccagccagccagcagcctacgccgcacaagccactaccccaatggctggctcctatggggcccagccggttgtgcagacccagctgaatagttacggggcccaagcatcaatgggcctttcaggctcctatggggctcagtcggctgctgcggccactggctcctatggtgccgcagcagcctacggggcccaaccttctgccactctggcagctccttaccgcactcagtcatcagcctcattggctgcttcctatgctgcccagcagcatccccaggctgctgcctcctaccgcggccagccaggcaatgcctacgatggggcaggtcagccgtctgcagcctacctgtccatgtcccagggggccgttgccaacgccaacagcaccccgccgccctatgagcgtacccgcctctccccaccccgggccagctacgacgatccctacaaaaaggctgtcgccatgtcgaaaaggtatggttccgaccggcgtttagccgagctctctgattaccgccgtttatcagagtcgcagctttcgttccgccgctcgccgacaaagtcctcgctggattaccgtcgcctgcccgatgcccattccgattacgcacgctattcgggctcctataatgattacctgcgggcggctcagatgcactctggctaccagcgccgcatgtagggccatcctgggatggggcaccacagggagggagggagaaaagaggtgggtagggttacagatccaggttataactactctggcccatacctttcctggttgtggtttttcatgccctctaccatgtgggccttccccaggagatgatcctgttaagtgttcggcagtaacctactttgttccttcgcctcagcagcaaatcttgctactggctctagatctgcggtttcccctctaccctgcctcctgtctccccagaatgggaatttcttttatgtttttatttttttcctggctcccttttatttttgtgcgcgatatttaaggtcgtctggatggggaagcaacctgcagctgaggtcgccggcgcctttttctttttagatgggaaggaggccaggaaagggtcagcttaaccatttcctatgtgccaagctgtgccagcagtccagggtaccctgactgtccctctgtagactgttgagactgagttcctgttgggacagtcagttggtatgtatccaagtccctgctgaccactaatgttctagctgatggtgagcggcacagtcccacttccccatctccccaagtaggtggtgttagaaaaccttaattttttttcccttttgtatggactacaaataaaacttggggcaatttgcagtttggaaaa

SEQ ID NO: 604 - DNA, 2954 bp, Homo sapiens
tgggccgcagccctccccgccccgccgaccgcggtcacacactctcggagcctccccgtgagcgggagcgcggcgcacggcgatgcgccgaggcgggcgctgaggcggcgccgcgcgagcagcagcagaggcggcggcggcccccagcccagcccggcgccgccgccgagcccgggccccaaggtgcggcggcgccccaagttcccgccatgagcagccggctcggggggctccgcggccccggggactcccgccccgccgggcgcgaccgcagcgccccgcggccccgacgcgcttaacgttgtcgcttgccggtcccgccaccgccgcctccgccgccgctcgcgtcctcgccgccaccgcctcggccgctgcagctccgccggcagcatgtctcgaaggaagatttcgtccgagtccttcagctccctgggctccgactacctggagaccagcccggaggaggagggggagtgccccctgtctaggctctgctggaatggcagccggagcccgcccgggccgctggagcccagcccggccgcagctgccgctgccgccgccccggccccgaccccggctgcttctgccgccgccgccgctgccactgccggggccaggagggtgcagcgccggaggcgggtcaacctggactcgctgggcgagagcatcagccgcctgacggcgccctcgcctcagacgatacagcagactctcaagaggacactgcagtattatgaacatcaagttattggttacagggatgcagaaaagaatttccacaatatctctaacagatgctcctatgcagaccactccaacaaagaagaaattgaagatgtctcaggaattcttcagtgtactgctaatatactcggtttgaagtttgaggaaattcaaaaaagatttggtgaagagttctttaatatatgctttcatgagaatgagagagtccttcgagctgtaggtggcactttgcaggacttttttaacggctttgatgctttgttggaacacattagaacttcttttggaaaacaggccactctggagtcaccatctttcctatgcaaagagctccctgaaggtactctcatgctccactacttccaccctcaccatattgtggggtttgcaatgctggggatgattaaggctgcaggaaagaagatctatcggctggatgtggaagtggaacaggttgcaaatgagaagctatgctctgatgtttcaaacccaggcaattgtagctgtcttactttccttatcaaagaatgtgaaaatactaatatcatgaagaaccttccacagggaacctcccaagttcctgcggacctcagaattagcatcaacaccttctgtagagccttccctttccacttgatgtttgatcccagcatgtcagtccttcagttgggggaaggtctaaggaagcagcttcgatgtgacactcacaaagtgctcaagtttgaggactgcttcgagattgtatctccaaaggttaatgccacctttgaaagggtcctgctgcgactgtctaccccgtttgtgattagaaccaagcctgaggcttctggctctgaaaataaagacaaggtgatggaagtcaaaggacaaatgatccatgttccagaatcaaattccattttatttttgggctctccatgtgtggacaagttggatgaactcatgggccgagggctacatctctcagacatccctatccatgatgccacccgagatgtcattttggttggtgagcaggcaaaggcccaagatgggttgaagaaaaggatggataaattaaaggcaactttagaaagaactcaccaggccctggaagaagagaaaaagaagacagtggatcttctatattctattttccctggtgatgtagcccagcaattatggcaagggcagcaagtacaggccagaaagtttgatgatgtcaccatgctcttttcagacattgttggcttcacagccatatgtgcccagtgtactcccatgcaagtaatcagcatgctgaatgaactgtacaccagatttgaccaccagtgtggatttttggatatttataaggtggaaacaataggtgatgcctactgtgttgcagcagggctccacagaaaaagcctctgccatgctaaacccattgctctgatggccttgaagatgatggaactttcagaagaggtgctgacacctgatggaagaccgattcagatgaggataggaattcactcaggctccgtgctggctggagttgttggggtgcgaatgccacgttattgcctgtttggaaataatgtcacactggcaagcaaattcgagtcgggaagtcaccctcggcgcatcaatgtcagcccaaccacttaccaattattaaaacgagaagaaagtttcacattcattccgcggtctcgtgaagagcttccagacaactttccaaaggaaattcctgggatctgctatttcctggaggtaaggactggtccaaagccaccaaagccttctctttcttcgtcgagaataaaaaaggtttcctacaacatcggcaccatgttcctccgggagacaagcctctgagacctgctacagatcaaagactcctccaaaaagcacaagcccagaacatgggtcaccaatggggggtggaaagagattgtgtctctttcattgctttgttgagaacaagcagcaaaatttctgtattatgtcaggcaataatcctactaaaaggtggaggtgaccgctgtcaataaaaagccggaggatgagggaaataagatgtgtccattcatatgagtggttttggtcatatatatacacatatattttaattacaagtgtgggtcccctttcagaactaaccaataaatagattccatgttttcttgtttatcacacatacaagtatctttccctatatatttgtaccacttttgagagcc

SEQ ID NO: 605 - DNA, 798 bp, Homo sapiens
gcacgagagaagaggaagccgcagcagccccagcgccgaccagcagggggcacaggacagagaagaggaagcggctacagccccagcgccgaccagcagggggcacaggacagagaagaggaagccgcagcagccccagcgccgaccagcagcgggcacaggacagagaagaggaagcggctgcagctccagtgccaaccagcagggggcacaggacagagaagaggaagcggccaaggccccagtgcccgaccagcagctttcacaggacagagaagaggaagccgcagcagccccagcgccgaccagcagcgggcacaggacagagaagaggaagcggccaggccccagcgccgaccagcagcgggcacaggacagagaagaggaagcgcagcagccccagtgccgaccagcagcggcacaggacagagaagaggaagcgcagcagccccagcgccgaccagcagcggcacaggacagagaagaggaagtgaggaaatggaagaagagggttgacctgagctgaaggacatgaacttccacgtgaaatagccccagggccgggcacacgaggtcaggagttcaagaccagcctggccaagatggtgaaaccctgtctctactaaaaataaaaaattagctgggtgcggtggcaggcacctgtaatcccagctactcaggaggctgaggcaggagaatcacttgacccaggaggtggaggttacagtgagccagatctcaccactgcactgtagcctggcaacagagcaagactccatgaaaaaaaaaaaaaaaaaa

SEQ ID NO: 606 - DNA, 397 bp, Homo sapiens
ccacatcccaggaggccgaggcggcttgccccgcatctcagaagccgggcaggccctgagccttctgacctcacatcctctgccacaccacagtggagaaaccagaactggaggagcagccagaatgcagagaagaaaaaagaggttctctgcatgtttggaagtcggaattggttgaagttgaagatgatgtgtatctgaggcacagctcttccctgacttataggctttgacactgctgttgaggtttgactcgaagcccagagttttggtgtggatgagcagggacaaattgctgagcatgaagaagagtaaaattaagcaagtggaacatatgccctttgcctctgctctgcacagtgaaatgaaaagtcaacctttgaaaaaaaaaaaaaaa

SEQ ID NO: 607 - DNA, 1234 bp, Homo sapiens
atgccagctgatataatggagaaaaattcctcgtccccggtggctgctaccccagccagtgtcaacacgacaccggataaaccaaagacagcatctgagcacagaaagtcatcaaagcctattatggagaaaagacgaagagcaagaataaatgaaagtctgagccagctgaaaacactgattttggatgctctgaagaaagatagctcgcggcattccaagctggagaaggcggacattctggaaatgacagtgaagcacctccggaacctgcagcgggcgcagatgacggctgcgctgagcacagacccaagtgtgctggggaagtaccgagccggcttcagcgagtgcatgaacgaggtgacccgcttcctgtccacgtgcgagggcgttaataccgaggtgcgcactcggctgctcggccacctggccaactgcatgacccagatcaatgccatgacctaccccgggcagccgcaccccgccttgcaggcgccgccaccgcccccaccgggacccggcggcccccagcacgcgccgttcgcgccgccgccgccactcgtgcccatccccgggggcgcggcgccccctcccggcggcgccccctgcaagctgggcagccaggctggagaggcggctaaggtgtttggaggcttccaggtggtaccggctcccgatggccagtttgctttcctcattcccaacggggccttcgcgcacagcggccctgtcatccccgtctacaccagcaacagcggcacctccgtgggccccaacgcagtgtcaccttccagcggcccctcgcttacggcggactccatgtggaggccgtggcggaactgagggggctcaggccacccctcctcctaaactccccaacccacctctcttccctccggactctaaacaggaacttgaatactgggagagaagaggacttttttgattaagtggttactttgtgtttttttaatttctaagaagttactttttgtagagagagctgtattaagtgactgaccatgcactatatttgtatatattttatatgttcatattggattgcgcctttgtattataaaagctcagatgacatttcgttttttacacgagatttcttttttatgtgatgccaaagatgtttgaaaatgctcttaaaatatcttcctttggggaagtttatttgagaaaatataataaaagaaaaaagtaaaggcaaaaaaaaaaaaaaaaa

SEQ ID NO: 608 - DNA, 1075 bp, Homo sapiens
gaaaattcaaagtcatgctcataactgttaatgaaagcagattcaaagcaacaccaccaccactgaagtatttttagttatataagattggaactaccaagcatgtggctcctggtcagtgtaattctaatctcacggatatcctctgttgggggagaagcaatgttctgtgattttccaaaaataaaccatggaattctatatgatgaagaaaaatataagccattttcccaagttcctacaggggaagttttctattactcctgtgaatataattttgtgtctccttcaaaatccttttggactcgcataacgtgcgcagaagaaggatggtcaccaacaccaaagtgtctcagactgtgtttctttccttttgtggaaaatggtcattctgaatcttcaggacaaacacatctggaaggtgatactgtacaaattatttgcaacacaggatacagacttcaaaacaatgagaacaacatttcatgtgtagaacggggctggtccactcctcccaaatgcaggtccactatttctgcagaaaaatgtgggccccctccacctattgacaatggagacattacttcattcctgttgtcagtatatgctccaggttcatcagttgagtaccagtgccagaacttgtatcaacttgagggtaacaatcaaataacatgtagaaacggacaatggtcagaaccaccaaaatgcttagatccatgtgtaatatcacaagaaattatggaaaaatataacataaaattaaagtggacaaaccaacaaaagctttattcaagaacaggtgacatagttgaatttgtttgtaaatctggatatcatccaacaaaatctcattcatttcgagcaatgtgtcagaatgggaaactggtatatcccagttgtgaagaaaaatagaatcaatggcattactattagtaaaatgcacacctttttctgaatttactattatatttgttttcaatttcatttttcaagtactgttttactcatttttattcataaataaagttttgtgttgatttgtaaaaaaaaaaaaaaaaaaaaaaaaaaaaaa

SEQ ID NO: 609 - DNA, 1477 bp, Homo sapiens
aactgtactcacgtgacagttccctgaatcttcatacagattatctcctaccctttatagtgcatgtttcttatgaaggcctccaacatgctagccatttcctactaaactaactcaactagcatgatgtcaacaacacagtcaatcaatgggatattttgtggggtgctcagatggcagaatgctcccacatcaataaaactcacccttatctaatcttcatgttctggtccccctctatcacccaccctcatgatccagtcccatgcctagtcccttgactcctgctggtacctgctggttaggtcttatggctcctctggtgtgtagtcccttttcttccccttttaaaaaatgttttgagacagggtcttttctgtcccctagactggagtgcagtgtcatgatcatggctcactgcagctttgacctcctggggtcaagtgatcctcatgtctcagtctcctgagtagctgggactacatgtgtgagccgccaagcctggctaattaaaaaaaattttttttttttttttgtagaagtgaatgttccgctatgttgcccaggttggtctcaaactgctaggctcaagtgatcttcctgccccaaactcttaggctcaagtgatcctcctgattttccttatccccgtgagcctcctgaagtgctggggttacagatgtgaggcacctcacccagccttttctctcttctcaaaatgagcacatctcctgctgtgttgtgctgggacttaaccctagttctaggccaagagggaaattgggcaagatggtgaagaaggcatattttgtcctagtgagagaggcctctgcaaacaaaggagtttagctctgaataggctgagtttagtccacttctgcaggctcaggggattaaggaaaatcagtgacttaagattttagaggcctcaatccaaataactctatcaatatatatgagggtgttggccgggcacggtggctcacgcctgtaatctcagcactttgggaggccgaggtgggtaaatcacttgaggtcaggagtttgagaccagcctggtcaacataaagaaaccccgtctctactaaaaatacaaaaaaagaaaaaaaaaaaaacaaaaaaaaacaaccctggcggggcatggtggcacacacctgtagtcccagctacttgggaggctgagactcaagaatctcttgaacctgggaggaggcagaggctgcagtgagccgagatcgtgccactgtgctccagcctgggcaacagagcaagactctgtctcaaaaacaccaaaaaaaaaaaaaaaaaaagaaaagaaaaaaccctgacttttctccagcagtctggatcaatcaccccaaacagtccagtgacccctgatggttgagcagcagcactagaaccccaaatttctaggggagacccagcttccagtttattaagttccatgcacttaattcttgttctgcttgatttt

SEQ ID NO: 610 - DNA, 1082 bp, Homo sapiens
gatcccagacctcggcttgcagtagtgttagactgaagataaagtaagtgctgtttgggctaacaggatctcctcttgcagtctgcagcccaggacgctgattccagcagcgccttaccgcgcagcccgaagattcactatggtgaaaatcgccttcaatacccctaccgccgtgcaaaaggaggaggcgcggcaagacgtggaggccctcctgagccgcacggtcagaactcagatactgaccggcaaggagctccgagttgccacccaggaaaaagagggctcctctgggagatgtatgcttactctcttaggcctttcattcatcttggcaggacttattgttggtggagcctgcatttacaagtacttcatgcccaagagcaccatttaccgtggagagatgtgcttttttgattctgaggatcctgcaaattcccttcgtggaggagagcctaacttcctgcctgtgactgaggaggctgacattcgtgaggatgacaacattgcaatcattgatgtgcctgtccccagtttctctgatagtgaccctgcagcaattattcatgactttgaaaagggaatgactgcttacctggacttgttgctggggaactgctatctgatgcccctcaatacttctattgttatgcctccaaaaaatctggtagagctctttggcaaactggcgagtggcagatatctgcctcaaacttatgtggttcgagaagacctagttgctgtggaggaaattcgtgatgttagtaaccttggcatctttatttaccaactttgcaataacagaaagtccttccgccttcgtcgcagagacctcttgctgggtttcaacaaacgtgccattgataaatgctggaagattagacacttccccaacgaatttattgttgagaccaagatctgtcaagagtaagaggcaacagatagagtgtccttggtaataagaagtcagagatttacaatatgactttaacattaaggtttatgggatactcaagatatttactcatgcatttactctattgcttatgccgtaaaaaaaaaaaaaaaaaaaaaaaaaaaaa

SEQ ID NO: 611 - DNA, 1891 bp, Homo sapiens
ccgaggctataagagggcgcacaagtggcgcggcgcaggagccgccgccagtggagggccgggcgctgcggccgcggccggggcgggcgcagggccgagcggacgggggggcgcgggccccccgggaggccgcggccactcccccccgggccggcgcggcgggggaggcggaggatggaaacacccttctacggcgatgaggcgctgagcggcctgggcggcggcgccagtggcagcggcggcacgttcgcgtccccgggccgcttgttccccggggcgcccccgacggccgcggccggcagcatgatgaagaaggacgcgctgacgctgagcctgagtgagcaggtggcggcagcgctcaagcctgcgcccgcgcccgcctcctacccccctgccgccgacggcgcccccagcgcggcaccccccgacggcctgctcgcctctcccgacctggggctgctgaagctggcctcccccgagctcgagcgcctcatcatccagtccaacgggctggtcaccaccacgccgacgagctcacagttcctctaccccaaggtggcggccagcgaggagcaggagttcgccgagggcttcgtcaaggccctggaggatttacacaagcagaaccagctcggcgcgggccgggccgctgccgccgccgccgccgccgccggggggccctcgggcacggccacgggctccgcgccccccggcgagctggccccggcggcggccgcgcccgaagcgcctgtctacgcgaacctgagcagctacgcgggcggcgccgggggcgcggggggcgccgcgacggtcgccttcgctgccgaacctgtgcccttcccgccgccgccacccccaggcgcgttggggccgccgcgcctggctgcgctcaaggacgagccacagacggtgcccgacgtgccgagcttcggcgagagcccgccgttgtcgcccatcgacatggacacgcaggagcgcatcaaggcggagcgcaagcggctgcgcaaccgcatcgccgcctccaagtgccgcaagcgcaagctggagcgcatctcgcgcctggaagagaaagtgaagaccctcaagagtcagaacacggagctggcgtccacggcgagcctgctgcgcgagcaggtggcgcagctcaagcagaaagtcctcagccacgtcaacagcggctgccagctgctgccccagcaccaggtcccggcgtactgagtcgggcatggcggccacctccaaggggcgggctcgcgggggggtgtcgtgggcgccccggacttggagagggtgcggccctccacccccccctccccgagtgtgcccaggaactcagagaggcgcggccccggggattcccccccgaggtgcccaggactcggaaggggcgccccggactcgacaagctggaccccctgctcccgggggcgagcgcatgacccccccgccctcgcgctgcctctttcccccgcgcggccgccccgtgttgcacaaacccgcgcgtctcggctgcccctttgtacaccgcgccgcaagggggctccgagggggcgcacgtcaaaccctgcctttcctttacttttactttttttttttctttggaagagagaagaacagagtgttcgattctgccctatttatgtttctactcggggaacaaacgttggttgtgtgtgtgtgtgttttcttgtgttggttttttaaagaaatgggaagaagaaaaaaaaattctccgcccctttcctcgatctcgctcccccttcggtctttcgaccgtccccccctcccctttttttgttctgttttgttttgttttgctacgagtccacattcctgtttgtaatccttggttcgcccggttttctgttttcagtaaagtctcgttacgcca

SEQ ID NO: 612 - DNA, 582 bp, Homo sapiens
cgcaaagctgagaacatggacgttaatatcgccccactccgcgcctgggacgatttcttcccgggttccgatcgctttgcccggccggacttcagggacatttccaaatggaacaaccgcgtagtgagcaacctgctctattaccagaccaactacctggtggtggctgccatgatgatttccattgtggggtttctgagtcccttcaacatgatcctgggaggaatcgtggtggtgctggtgttcacagggtttgtgtgggcagcccacaataaagacgtccttcgccggatgaagaagcgctaccccacgacgttcgttatggtggtcatgttggcgagctatttccttatctccatgtttggaggagtcatggtctttgtgtttggcattacttttcctttgctgttgatgtttatccatgcatcgttgagacttcggaacctcaagaacaaactggagaataaaatggaaggaataggtttgaagaggacaccgatgggcattgtcctggatgccctagaacagcaggaagaaggcatcaacagactcactgactatatcagcaaagtgaaggaataa

SEQ ID NO: 613 - DNA, 6941 bp, Homo sapiens
tggaaaacccgaggatgaagcttcaggtagtttttttaagcaaatcgattcttctcccgtaggaggtgaaacagacgagaccactgtgagccagaattaccgtggcagcgtgtcccagccctcaaccccgagccccccgaaacctacaggaatatttcagacaagtgcaaatagttctttcgaaccggtaaaatctcacttagttggggtaaaaccatttgaggcagatcgcgccaacgtggttggtgaagtaagggagacctgtgtccgccagaagcagtgcagaccagctgccgccctgcccgatgcttcccctggcaacctggagcagccaccagacaacatggagaccctctgtgcaccccaggtctgtcccctgcctcttaactccaccacggaagctgtgcacatgcttccgcacgcaggggcaccgcccttggatactgtgtatccagcacccgagaagaggccttcagccaggacccaggggcccgtgaagtgtgagagcccagcaacgactctgtgggcgcaaagtgagctgccagattttggaggcaacgtccttctggcccctgcagccccggcgctttatgtgtgtgcaaaacctcagccacctgttgttcagcctccagaagaggcgatgtccgggcagcagtcacggaacccaagctcggcggccccggtgcagagccgaggtggcattggtgcttctgagaaccttgagaatcctcccaaaatgggagaggaggaggcccttcagtcccaggcgagttctggttatgcaagtttattatcctcaccgcccactgagtctctgcagaatcctccagtcttgattgctcagcctgatcacagctataatctggctcagcccattaacttttctgtgtccttatcgaactctcatgagaagaatcagtcctggagagaggctttggtgggggatagacctgcagtcagcagttgggctctcggtggtgattctggggagaacacttctttgtctgggattccaaccagctctgtccttagcttgtctctgcctagcagtgttgcccaaagtaattttccacaaggttctggtgcttccgaaatggtttctaatcagcctgctaatttgctggttcaaccaccatcccagccagttccagagaacttggttccagaaagtcaaaaggatcgtaaggcaggaagtgctcttcctggatttgctaatagccctgctggaagcacaagtgtggtgttagttccacctgcacacggcaccctggtgcctgatggtaataaggcaaaccattccagtcatcaggaagacacttacggagccctagactttaccttaagcaggactttggaaaatcctgtaaacgtgtacaacccgtcccattctgacagcctcgcttctcagcaaagtgttgccagtcatcccagacaatctgggcctggggcgcctaaccttgaccgtttttatcagcaggtcacgaaagatgcccagggccagcctggcctcgaaagagcccagcaggagctggtgccaccccagcaacaggcttctcccccacaactacccaaagccatgttttcggagctgtcaaatccagaaagtctgcccgcacagggacaggcccagaactcagcacagtcaccagcaagtctggttctggtcgacgcgggtcagcagctgccccctcggcctcctcagtcctctagcgtgtctctggtgtccagtggctccggccaggcagctgtgccgtcagagcagccgtggccacagccagtgcctgcacttgcccccggcccaccgcctcaggacctggccgcctactactactaccggcctttgtacgatgcctaccagcctcagtactctttgccgtacccaccggagcctggcgcagcctccctctattaccaggatgtctacagcctctatgagcctcgatacaggccctatgatggtgctgcgtctgcttacgcccagaactaccgctatcccgagcccgagcggcccagctcccgagccagccactcctcggaacggccacctcccaggcaaggatatcctgaaggatactatagttccaaaagtggatggagcagtcagagcgattactatgcaagctattactccagccagtacgattatggagatccaggtcactgggatcgttaccactacagtgctagagtcagggacccccgcacctatgaccggaggtattggtgtgatgcagagtatgacgcatacaggagagagcactctgccttcggggacaggcccgagaaacgtgacaacaactggaggtacgatcctcgcttcacggggagttttgacgatgaccccgatccgcacagagacccttatggggaagaggtggaccggcgcagcgtccacagcgagcactcggcacggagcctgcacagcgcacacagcctggccagccgccgcagcagcctcagctcccactcgcaccagagtcagatttacagaagccacaatgtggctgccggttcctacgaggccccgcttcctccaggctcctttcacggcgattttgcctacggcacctaccgcagcaatttcagcagtggccccggcttcccagagtatggctaccctgccgacaccgtctggcctgccatggagcaagtttcatcaagaccaacttctcctgaaaaattttcagtgcctcatgtctgtgccaggtttggccctggcggtcagcttatcaaagtgattcccaatctgccttcagaaggacagccggccttggtggaggtccacagcatggaggccttgctgcagcacacgtctgagcaggaggagatgcgggcgttcccgggacccctggccaaagacgacacccataaggtggatgtcattaattttgcacagaacaaagctatgaaatgtttgcagaatgaaaacttaattgacaaagagtctgcaagtcttctttggaattttattgttctcttatgcagacaaaatgggaccgtggtagggaccgacattgcggagcttctgttacgagaccacagaacagtgtggcttcctgggaagtcgcccaatgaagcaaacctgattgatttcacgaatgaggcagtggagcaggtggaagaggaggagtctggtgaggcccagctctctttcctcactggtggtccggcggctgccgccagctcgctcgagagagagaccgagaggttcagggagctgttgctgtatggccgtaagaaggatgctttggagtctgcaatgaagaatggcctgtggggtcacgctctgctacttgcaagtaagatggacagccggacacacgcccgagtcatgaccaggtttgctaacagcctcccaatcaacgaccctctgcagacagtctaccagctcatgtccggacggatgcctgccgcgtccacgtgctgtggagacgagaaatggggagattggaggccgcacctcgccatggtcttgtccaacttgaacaacaacatggacgtcgagtccaggacgatggctaccatgggcgacactctggcttcaaggggcctcttggatgcggcccacttctgctacctcatggcccaggcgggatttggtgtttacacgaagaaaactacaaagcttgtcttaatcggatccaatcacagtttgccattcttaaagttcgcaaccaacgaagcaatccagaggacggaagcctatgagtacgcccagtccctgggtgccgagacctgccccctgcctagtttccaggtgtttaagttcatctactcctgccgcctggcggaaatggggctggccacgcaagccttccactactgtgaggccatcgcgaagagcatcctgacgcagccgcacctgtattccccggtgttgatcagccagcttgtgcagatggcttcccagttacgactcttcgatccccagctgaaagagaagccagaagaggagtccttggccgcacccacgtggctggttcacctgcagcaggtggagcggcagattaaggagggggctggagtatggcatcaggatggagccctcccgcagcagtgtcctggcactccgagttccgagatggagcagttggacaggccaggactcagtcagccaggagccctggggatcgccaaccctctgctggcggtgcctgcaccgagccctgagcactcgagcccgagcgtgcggctgctgccctcagctccgcagacgctccctgacggcccattggccagtcctgccagagtgccgatgttcccagtgccactgcccccggggcccctggagccgggtcctggctgtgtgaccccagggcctgcacttggcttcctggagccctccgggcctggcctcccacctggtgtgccacctctgcaggaaaggagacacttgctccaggaagccaggagcccagacccagggatagtgccgcaggaggcgcctgttggaaactcactttccgagctaagcgaagaaaattttgatggaaaatttgctaatctgaccccctcgaggacggtgccagactcggaggcccccccagggtgggatcgtgccgactcgggtcccacgcagccacctctgtctctctcacccgctcccgaaacaaagagacccggacaggcagccaagaaagaaacgaaggaacctaagaagggtgaatcctggttctttcgttggctacctggaaagaaaaagacagaagcttatttgccagatgacaagaacaaatcgattgtttgggatgaaaagaaaaaccagtgggtgaatttaaatgagccagaagaggagaagaaagccccgcccccacctccaacctcgatgcccaagactgtgcaagctgccccgcctgccctcccagggcctcctggagcccccgtgaacatgtactctagaagagcagcaggaaccagagctcgctacgttgacgtcctgaacccaagcgggacccagcggagcgagccggctctcgctcctgcggactttgtcgctccactcgcgccactcccaattccttctaacttgttcgtgccaaccccagatgcagaagaaccacagcttccagacgggactggcagggaagggcctgcagcagctaggggcctggccaatccagagcctgccccagagcccaaggctcctggcgacctccctgctgcagggggccctcccagcggggccatgcccttctacaaccctgctcagctggcacaggcctgcgccacctccgggagctcaaggctagggaggattggccagaggaagcacctggtgctgaactaggcttgccctgctgtgaacttgcacttggagccctgacgctgctgttctccccgaagaacccgaccgacctccgcgatctccgtcccgcccccagggagacacagcagtgactcagagctggtcgcacactgtgcctccctcctcaccgcccatcgtaatgaattattttgaaaattaattccaccatcctttcagattctggatggaaagactgaatctttgactcagaattgtttgccgaaaagaatgatgtgactttcttagtcatttaggatgatttaaggatatagtattcctggtcatttaagaatgttcattcattgaagccggagctgtctctgccacgggagagccacatggtcggtagtaaccagggcctctccaagcccagctgtgagtcactgcccagtgagtcccgcgcttcctttaaggtgctgggagcaaagagagggtgactgaggcagaccccaacccctgctctgcaccatctgggccctcgccgtgtttgaacctggctgaatgagtggagggcgctgtgttctcaatcagcgcctccgaggagccgtggggttccttcggcattagttcacggtttttgagagaggccctagttactgcagtgaatttctttcctgttgcagagacgcttccagcctcactttactttctgtggcctgatgaggaccatgggtgattttgtgtacccaaagcgctggggactgcccaccgtgtggcccagtcactgggaaggagccccagagagccggctgtctgacatgatggctcagggtggtcatccaggttgaaaactgaccgtgtgatgtttgatttgggcttcatttcgtgtgtaggagcacggttagactcactgttaaggaagctggatgcacttctctaaaaggctgcactttccgtgagcacttttcgtggtacaatccacatgacccactttctcccctgggggacgttggttcagaggttggtagcacttggggagagtatcttaacacagtttcttgacagcagctctggaacttagtatttctgccccgagttttgccacactgagactttgagtagctcctggtggactcaaccctgttcaactcagagacgggcctcctctcactgatgcaaagctttaaggcttctctgactgttctgaaactcttcgtattcttgtcaagtctaaagagactgaagaaaagatttaaatactaataaaaatcagtagataatttctgtaggttctgctggaggaatacaaactgtttggtgttttaaatttaagtgtagaaattgtagaatgtggaattagcacagatccttcctggctttctgtttcacttgatcatttagcccagaccacccaggatgttttccaaaatgttccacaggcgtgtcccgctggatccatttgtccttgtcacttggagaaaggccagtccctgtgacggggcagccctctctgtccctcggtcagctcgtgtgaatcctgggacctcttccggtcggctctgcccgctgttctggggtcgactgccacgacttttgattcaagaagcttcctccaggcgggagcggctatttttcctaaatgagaattgttacattgcaaattgttgaataaaatattttgcgctccttcaagcac

SEQ ID NO: 614 - DNA, 1410 bp, Homo sapiens
agtgcgcaggcgcgaagaagctggcaggggcacgagccgggggcgggtttgaagacgcgtcgttgggttttggaggccgtgaaacagccgtttgagtttggctgcgggtggagaacgtttgtcaggggcccggccaagaaggaggcccgcctgttacgatggtgtccatgagtttcaagcggaaccgcagtgaccggttctacagcacccggtgctgcggctgttgccatgtccgcaccgggacgatcatcctggggacctggtacatggtagtaaacctattgatggcaattttgctgactgtggaagtgactcatccaaactccatgccagctgtcaacattcagtatgaagtcatcggtaattactattcgtctgagagaatggctgataatgcctgtgttctttttgccgtctctgttcttatgtttataatcagttcaatgctggtttatggagcaatttcttatcaagtgggttggctgattccattcttctgttaccgactttttgacttcgtcctcagttgcctggttgctattagttctctcacctatttgccaagaatcaaagaatatctggatcaactacctgattttccctacaaagatgacctcctggccttggactccagctgcctcctgttcattgttcttgtgttctttgccttattcatcatttttaaggcttatctaattaactgtgtttggaactgctataaatacatcaacaaccgaaacgtgccggagattgctgtgtaccctgcctttgaagcacctcctcagtacgttttgccaacctatgaaatggccgtgaaaatgcctgaaaaagaaccaccacctccttacttacctgcctgaagaaattctgcctttgacaataaatcctataccagctttttgtttgtttatgttacagaatgctgcaattcagggctcttcaaacttgtttgatataaaatatgttgtcttttgtttaagcatttattttcaaacactaaggagctttttgacatctgttaaacgtctttttgtttttttgttaagtcttttacattttaatagtttttgaagacaatctaggttaagcaagagcaaagtgccattgtttgcctttaattggggggtgggaagggaaagagggtacttgccacatagtttcctttttaactgcactttctttatataatcgtttgcattttgttacttgctaccctgagtactttcaggaagactgacttaaatattcggggtgagtaagtagttgggtataagatctgaacttttcatctgcagaggcaagaaaaatatttgacattgtgacttgactgtggaagatgatggttgcatgtttctagtttgtatatgtttccatctttgtgataagatgatttaataaatctctttaaat

SEQ ID NO: 615 - DNA, 5059 bp, Homo sapiens
cgaggggggaggcggaggcgccgggagccgcgcgaggagccgccgccgccgcgccatggagcccgagtgagcgcggcgcgggcccgtccggccgccggacaacatggaggcagcgccgcccgggccgccgtggccgctgctgctgctgctgctgctgctgctggcgctgtgcggctgcccggcccccgccgcggcctcgccgctcctgctatttgccaaccgccgggacgtacggctggtggacgccggcggagtcaagctggagtccaccatcgtggtcagcggcctggaggatgcggccgcagtggacttccagttttccaagggagccgtgtactggacagacgtgagcgaggaggccatcaagcagacctacctgaaccagacgggggccgccgtgcagaacgtggtcatctccggcctggtctctcccgacggcctcgcctgcgactgggtgggcaagaagctgtactggacggactcagagaccaaccgcatcgaggtggccaacctcaatggcacatcccggaaggtgctcttctggcaggaccttgaccagccgagggccatcgccttggaccccgctcacgggtacatgtactggacagactggggtgagacgccccggattgagcgggcagggatggatggcagcacccggaagatcattgtggactcggacatttactggcccaatggactgaccatcgacctggaggagcagaagctctactgggctgacgccaagctcagcttcatccaccgtgccaacctggacggctcgttccggcagaaggtggtggagggcagcctgacgcaccccttcgccctgacgctctccggggacactctgtactggacagactggcagacccgctccatccatgcctgcaacaagcgcactggggggaagaggaaggagatcctgagtgccctctactcacccatggacatccaggtgctgagccaggagcggcagcctttcttccacactcgctgtgaggaggacaatggcggctgctcccacctgtgcctgctgtccccaagcgagcctttctacacatgcgcctgccccacgggtgtgcagctgcaggacaacggcaggacgtgtaaggcaggagccgaggaggtgctgctgctggcccggcggacggacctacggaggatctcgctggacacgccggacttcaccgacatcgtgctgcaggtggacgacatccggcacgccattgccatcgactacgacccgctagagggctatgtctactggacagatgacgaggtgcgggccatccgcagggcgtacctggacgggtctggggcgcagacgctggtcaacaccgagatcaacgaccccgatggcatcgcggtcgactgggtggcccgaaacctctactggaccgacacgggcacggaccgcatcgaggtgacgcgcctcaacggcacctcccgcaagatcctggtgtcggaggacctggacgagccccgagccatcgcactgcaccccgtgatgggcctcatgtactggacagactggggagagaaccctaaaatcgagtgtgccaacttggatgggcaggagcggcgtgtgctggtcaatgcctccctcgggtggcccaacggcctggccctggacctgcaggaggggaagctctactggggagacgccaagacagacaagatcgaggtgatcaatgttgatgggacgaagaggcggaccctcctggaggacaagctcccgcacattttcgggttcacgctgctgggggacttcatctactggactgactggcagcgccgcagcatcgagcgggtgcacaaggtcaaggccagccgggacgtcatcattgaccagctgcccgacctgatggggctcaaagctgtgaatgtggccaaggtcgtcggaaccaacccgtgtgcggacaggaacggggggtgcagccacctgtgcttcttcacaccccacgcaacccggtgtggctgccccatcggcctggagctgctgagtgacatgaagacctgcatcgtgcctgaggccttcttggtcttcaccagcagagccgccatccacaggatctccctcgagaccaataacaacgacgtggccatcccgctcacgggcgtcaaggaggcctcagccctggactttgatgtgtccaacaaccacatttactggacagacgtcagcctgaagaccatcagccgcgccttcatgaacgggagctcggtggagcacgtggtggagtttggccttgactaccccgagggcatggccgttgactggatgggcaagaacctctactgggccgacactgggaccaatagaatcgaagtggcgcggctggacgggcagttccggcaagtcctcgtgtggagggacttggacaacccgaggtcgctggccctggatcccaccaagggctacatctactggaccgagtggggcggcaagccgaggatcgtgcgggccttcatggacgggaccaactgcatgacgctggtggacaaggtgggccgggccaacgacctcaccattgactacgctgaccagcgcctctactggaccgacctggacaccaacatgatcgagtcgtccaacatgctgggtcaggagcgggtcgtgattgccgacgatctcccgcacccgttcggtctgacgcagtacagcgattatatctactggacagactggaatctgcacagcattgagcgggccgacaagactagcggccggaaccgcaccctcatccagggccacctggacttcgtgatggacatcctggtgttccactcctcccgccaggatggcctcaatgactgtatgcacaacaacgggcagtgtgggcagctgtgccttgccatccccggcggccaccgctgcggctgcgcctcacactacaccctggaccccagcagccgcaactgcagcccgcccaccaccttcttgctgttcagccagaaatctgccatcagtcggatgatcccggacgaccagcacagcccggatctcatcctgcccctgcatggactgaggaacgtcaaagccatcgactatgacccactggacaagttcatctactgggtggatgggcgccagaacatcaagcgagccaaggacgacgggacccagccctttgttttgacctctctgagccaaggccaaaacccagacaggcagccccacgacctcagcatcgacatctacagccggacactgttctggacgtgcgaggccaccaataccatcaacgtccacaggctgagcggggaagccatgggggtggtgctgcgtggggaccgcgacaagcccagggccatcgtcgtcaacgcggagcgagggtacctgtacttcaccaacatgcaggaccgggcagccaagatcgaacgcgcagccctggacggcaccgagcgcgaggtcctcttcaccaccggcctcatccgccctgtggccctggtggtggacaacacactgggcaagctgttctgggtggacgcggacctgaagcgcattgagagctgtgacctgtcaggggccaaccgcctgaccctggaggacgccaacatcgtgcagcctctgggcctgaccatccttggcaagcatctctactggatcgaccgccagcagcagatgatcgagcgtgtggagaagaccaccggggacaagcggactcgcatccagggccgtgtcgcccacctcactggcatccatgcagtggaggaagtcagcctggaggagttctcagcccacccatgtgcccgtgacaatggtggctgctcccacatctgtattgccaagggtgatgggacaccacggtgctcatgcccagtccacctcgtgctcctgcagaacctgctgacctgtggagagccgcccacctgctccccggaccagtttgcatgtgccacaggggagatcgactgtatccccggggcctggcgctgtgacggctttcccgagtgcgatgaccagagcgacgaggagggctgccccgtgtgctccgccgcccagttcccctgcgcgcggggtcagtgtgtggacctgcgcctgcgctgcgacggcgaggcagactgtcaggaccgctcagacgaggtggactgtgacgccatctgcctgcccaaccagttccggtgtgcgagcggccagtgtgtcctcatcaaacagcagtgcgactccttccccgactgtatcgacggctccgacgagctcatgtgtgaaatcaccaagccgccctcagacgacagcccggcccacagcagtgccatcgggcccgtcattggcatcatcctctctctcttcgtcatgggtggtgtctattttgtgtgccagcgcgtggtgtgccagcgctatgcgggggccaacgggcccttcccgcacgagtatgtcagcgggaccccgcacgtgcccctcaatttcatagccccgggcggttcccagcatggccccttcacaggcatcgcatgcggaaagtccatgatgagctccgtgagcctgatggggggccggggcggggtgcccctctacgaccggaaccacgtcacaggggcctcgtccagcagctcgtccagcacgaaggccacgctgtacccgccgatcctgaacccgccgccctccccggccacggacccctccctgtacaacatggacatgttctactcttcaaacattccggccactgcgagaccgtacaggccctacatcattcgaggaatggcgcccccgacgacgccctgcagcaccgacgtgtgtgacagcgactacagcgccagccgctggaaggccagcaagtactacctggatttgaactcggactcagacccctatccacccccacccacgccccacagccagtacctgtcggcggaggacagctgcccgccctcgcccgccaccgagaggagctacttccatctcttcccgccccctccgtccccctgcacggactcatcctgacctcggccgggccactctggcttctctgtgcccctgtaaatagttttaaatatgaacaaagaaaaaaatatattttatgatttaaaaaataaatataattgggatttt

SEQ ID NO: 616 - DNA, 1710 bp, Homo sapiens
ccgcggcggcggagaagcagctcgccagccagcagcccgccagccgccgggaggttcgatacaagaggctgttttcctagcgtggcttgctgcctttggtaagaacatgtcgtccatcttgccattcacgccgccagttgtgaagagactgctgggatggaagaagtcagctggtgggtctggaggagcaggcggaggagagcagaatgggcaggaagaaaagtggtgtgagaaagcagtgaaaagtctggtgaagaagctaaagaaaacaggacgattagatgagcttgagaaagccatcaccactcaaaactgtaatactaaatgtgttaccataccaagcacttgctctgaaatttggggactgagtacaccaaatacgatagatcagtgggatacaacaggcctttacagcttctctgaacaaaccaggtctcttgatggtcgtctccaggtatcccatcgaaaaggattgccacatgttatatattgccgattatggcgctggcctgatcttcacagtcatcatgaactcaaggcaattgaaaactgcgaatatgcttttaatcttaaaaaggatgaagtatgtgtaaacccttaccactatcagagagttgagacaccagttttgcctccagtattagtgccccgacacaccgagatcctaacagaacttccgcctctggatgactatactcactccattccagaaaacactaacttcccagcaggaattgagccacagagtaattatattccagaaacgccacctcctggatatatcagtgaagatggagaaacaagtgaccaacagttgaatcaaagtatggacacaggctctccagcagaactatctcctactactctttcccctgttaatcatagcttggatttacagccagttacttactcagaacctgcattttggtgttcaatagcatattatgaattaaatcagagggttggagaaaccttccatgcatcacagccctcactcactgtagatggctttacagacccatcaaattcagagaggttctgcttaggtttactctccaatgttaaccgaaatgccacggtagaaatgacaagaaggcatataggaagaggagtgcgcttatactacataggtggggaagtttttgctgagtgcctaagtgatagtgcaatctttgtgcagagccccaattgtaatcagagatatggctggcaccctgcaacagtgtgtaaaattccaccaggctgtaatctgaagatcttcaacaaccaggaatttgctgctcttctggctcagtctgttaatcagggttttgaagccgtctatcagctaactagaatgtgcaccataagaatgagttttgtgaaagggtggggagcagaataccgaaggcagacggtaacaagtactccttgctggattgaacttcatctgaatggacctctacagtggttggacaaagtattaactcagatgggatccccttcagtgcgttgctcaagcatgtcataaagcttcaccaatcaagtcccatgaaaagacttaatgtaacaactcttctgtcatagcattgtgtgtggtccctatggactgtttactatccaaaagttcaagagagaaaacagcacttgaggtctcatcaattaaagcaccttgtggaatctgtttcctatatttgaatattagatgggaaaattagtgtcataaagatc

SEQ ID NO: 617 - DNA, 1992 bp, Homo sapiens
ggtgtctttagttttactgtctggagaatcagatgcacaccttcacttagctgtgaatgtcacctccacccagcccagtgcccagaggccaaaatttggcccagatctctccttacctcctagccccagcaccaggtgtattcatcagaggagcccaggtggagggtgcactgggccctctgccaagcttcctgtggggacggcaggcccagtagcctttcggccagcccgtctctgggggcactgcctgctgtggaacggccagagctcctgttcctaggtgggtgaccagaccccacacagcatgggcaacctggcccaggtcccttatctctctgtcccctggtccctttgcccaaggaaaggcccccctctccacaccatctccctatttttggaagccctctttgcagacttctccctgctctgggagtcggagcttgtgggccagccttccatctccccttgcaggtatgtcagtggcacctcccagtgaggagatgggttcaaggggagggactgggttggccttccctttgcatggtactgagtgtggagtgtgtggcaaatgcatcacacaccatgtgtccctggagctgtataaatgaggctggtctagggggtccaggactagctttatccaggaggggagcaacggacctggccacttccatccccacagccctgtttctgtgtttttggcaggatgcaacctgaagatcttcaacaaccaggagttcgctgccctcctggcccagtcggtcaaccagggcgttgaggctgtctaccagttgacccgaatgtgcaccatccgcatgagcttcgtcaaaggctggggagcggagtacaggagacagactgtgaccagtaccccctgctggattgagctgcacctgaatgggcctttgcagtggcttgacaaggtcctcacccagatgggctccccaagcatccgctgttccagtgtgtcttagagacatcaagtatggtaggggagggcaggcttggggaaaatggccatgcaggaggtggagaaaattggaactctactcaacccattgttgtcaaggaagaagaaatctttctccctcaactgaaggggtgcacccacctgttttctgaaacacacgagcaaacccagaggtggatgttatgaacagctgtgtctgccaaacacatttaccctttggccccactttgaagggcaagaaatggcgtctgctctggtggcttaagtgagcagaacaggtagtattacaccaccggccccctccccccagactctttttttgagtgacagctttctgggatgtcacagtccaaccagaaacacccctctgtctaggactgcagtgtggagttcaccttggaagggcgttctaggtaggaagagcccgcagggccatgcagacctcatgcccagctctctgacgcttgtgacagtgcctcttccagtgaacattcccagcccagccccgccccgccccgccccaccactccagcagacctcgccccttgtgagctggatagacttgggatggggagggagggagttttgtctgtctccctcccctctcagaacatactgattgggaggtgcgtgttcagcagaacctgcacacaggacagcgggaaaaatcgatgagcgccacctctttaaaaactcacttacgtttgtcctttttcactttgaaaagttggaaggatctgctgaggcccagtgcatatgcaatgtatagtgtctattatcacattaatctcaaagagattcgaatgacggtaagtgttctcatgaagcaggaggcccttgtcgtgggatggcatttggtctcaggcagcaccacactgggtgcgtctccagtcatctggtaagagcttgctccagattctgatgcatacggctatattggtttatgtagtcagttgcattcattaaatcaactttatcatatgctcttttaaaaaaaaaaaaaaaaaaaaaaaaaaaaaaaa

SEQ ID NO: 618 - DNA, 2291 bp, Homo sapiens
gactgcggctcagaggcggaggggagactgaccggagcgcggatcgggacagcggccgggacagcggcgagacgcgcgtgtgtgagcgcgccggaccaagcgggcccagaagcgggtctgcagcccagagggcaccttctgcaaacatgtctgtggatcccctatccagcaaagctctaaagatcaagcgagagctgagcgagaacacgccgcacctgtcggacgaggcgctgatggggctgtcggtgcgcgagctgaaccggcatctgcgcgggctctccgccgaggaggtgacacggctcaagcagcggcgccgcacactcaaaaaccgtggctacgccgccagctgccgcgtgaagcgcgtgtgccagaaggaggagctgcagaagcagaagtcggagctggagcgcgaggtggacaagctggcgcgcgagaacgccgccatgcgcctggagctcgacgcgctgcgcggcaagtgcgaggcgctgcaggcgttcgcgcgctccgtggccgccgcccgcgggcccgccacgctcgtggcgccggccagcgtcatcaccatcgtcaagtccaccccgggctcggggtctggccccgcccacggcccggaccccgcccacggcccggcctcctgctcctagtgcccgcccccgccatgcctcagccacgcccctccggcctcagctccctccccaaagtgcctgagcgccgcctctgtgcccaggtcccatttctctgcagcactggccccttggtgcacacacattcccttcgtgggccctgtcttcctcttgcagcccaccaaactgggaccgaatgaccctgggaaggggaacttgggtaggttggggatggggcagaggtctggatctgggatcgcccttggctgaaagtttagcctttttagattgagagatacagagccggcttagagaacagctgttgggggagaagagggcacccctcatcttggaaactgctcttattgtgccaatatgccctccaaaccctcccaggattcaaagctaggtttggctgtctgtgacttacgggaccgtcctgctgagaaattgcactgaagagatgcccccacctctggttgggcctgggggtgcctggccttccgaaactaaaagagtgggtgggaagactagtgaaacccagttcacggatggggaaacaggcctgaggtcacatttcacttagtggttgtgttgggaccaaaacctgggtgtcctcactgctgccctgagtccagccatggttttcagggggacagtggacagggactcagaaatgtggtgggagggcctccctggcttgggagaccgctctctgcaagggagggggagagaagcagagggagagagaaggtgacacggatggaagagtgggaaggagctggcctggctcagccctaggctgtccctgcagccagggtgtccgggggctggccagtcagagaaagggggccatggactgctgtggcaaatagggagacaaggagacagaccctgcagtcctactacagtctggagtggggtcctaagaagaagggtcccacctcaacccctgtcagtgtccactgtggggtgggggctgacccctgcctttgattgtcattctcctgggaagcccagtctcagtccctcccccaacactgtccacactgcccctccccactgtttatttattgcacggatctaagttattctccccagccagagcccgagctcctgctccctgggaaaagtggcgtatggccctgagctgggctttatattttatatctgcaaataaatcacattttatcttatatttagggaaagccggagagcaacaacaaaaaatgtttaagccggcgccggtggctcacatctgtaatcccagcactttgggagtccaaggagggggatcgcttgagtccaggagtttgagaccagcctggacaacatggtgaaaccccgtctctacaaaaaatacaaaaattagccatgcatggtggctcatgcctgtagtcccagctacttgggaggctgaggcaggaggatcacttaagcccagaaggcagaggttgtagtgagctgagatcgcaccactgcactccagcctgggcaacatagcaaaatcctgtctcaaaaaaaaagttaaaaaatattgcccggctcctagaatttatttatttcctgacttacagcaagcgagttatcgtcttctgtattttgtagactttctaaataaagtcaaattctttctttttccacagaagaaaaaaaaaaaaaaaaaaaaaa

SEQ ID NO: 619 - DNA, 13548 bp, Homo sapiens
  misc_feature (252)..(351): n is a, c, g, or t
  misc_feature (3748)..(3847): n is a, c, g, or t
tccggcggcgcgtagtcttgattggtggaacctgggagagggggcggggcaccggggaattcgaatgggagaggcgggcccaaggagggagtggaatggccgcgggcggctcgacgcagcagaggcgacgcgagatggcggcagcttcagcggcggcgatctcaggtacttgagcccggcctgggcaaggcgggtaccgacgtctggagtttagtgggagttatgtgtcggagtgtggtccaggctctgcgnnnnnnnnnnnnnnnnnnnnnnnnnnnnnnnnnnnnnnnnnnnnnnnnnnnnnnnnnnnnnnnnnnnnnnnnnnnnnnnnnnnnnnnnnnnnnnnnnnnngcaaagttggtccctgcttcttctgctaccaccatacttcatgtctaaaagtgatcttctctcctccaggagctggtcgctgtcggctaagcaagattggagctactcgtcgtccacctccagctcgcgtaagggtggctgtgcgactgcggccatttgtggatggaacagcgggagcaagtgatcccccctgtgtgcggggcatggacagctgctctctagagattgctaactggaggaaccaccaggagactctcaaataccagtaaggttcaggccactcctcttccctcatgccatcacctccctctcctaggcctgcccacgttcccctgcctccccaggatccttgctccctccttagcaccgctttgttccctgagccttcactgttcacttaggaaatgttgacaggtgcccccatgatgggccctctctgggatactgtagggagagatgagaggttgaatcaaacatacattactgtgcacagagagggaggagcaatgagggtgagcaggtgagccccaagtagaggctgggggacatatcaggagggttgggggaacacagacctgccagccagcctacccaagctgcagctgggtagtgtcagagaagaccacccagatttggggacagaactcagaagggcagctactttataatcctactggggatttaaagttcaaactccttggcctgtttttctaggcgggggctggcaaaccatggcctgcaggtcaaatctgatcaggagtaagattttcagtaaataaaattttatcgtttatttacatattgtctatagctgctttctgactacagtggcagagttgagtagttgtaaaaggaacacatggcccacaaagcctaaaatatgtacaatctgcctttttacagaagtttgctagctcccatactaggccgttaacaatttgggcttcagtttctttccagcctcattccctcaatatatattaaactccctgctgtggcctaagctgcacttctccaccagaacgcagtggataggtgattggtatgtagagtctagttcagtcataagcagcatcctctattttccccattatggtgtaaaatacaatgttctacacatgtagccatttgaaaaagactgggaagccttgcttttttgctattcttgattctcagaatttctttctttggtcaaaatcttccttccttgagcagaatcagttactcctttgagagtgtgttcttatcttcgtttcctaaatcacagcaaagtgtggatatctatcctaccagactgaaaaactccaagagcagggatatcagatctatctctgtattcctaacaccaatagagagatgaggatggagtaggtgttaggtggatgctttttaaggtctttgtacaagaaaggggatagagacgttctcttaaatccaaggtccagatgagagtagaatcccttacccacccccaccccactccaccccttacacacacacacacacacacacacacacacgctaatttctttctttcttcctgcaggtttgatgccttctatggggagaggagtactcagcaggacatctatgcaggttcagtgcagcccatcctaaggcacttgctggaagggcagaatgccaaggtggtgcttgcctatggacccacaggagctggtgagggagccagaaaagaaacagctatgggtcagaaagggctggggaaacggagaggaaaacctcacagttttctccactctcttcccagggaagacgacacatgctgggcagcccagagcaacctggggtgatcccgcgggctctcatggacctcctgcagctcacaagggaggagggtgccgagggccggccatgggcctttctgtcaccatgtcttacctagagatctaccaggagaaggtgaggccccgtgctggttgggagaggagcaacaaagggtcaaagtaagacctggttctagaacatgaagctctgctgtagcagggaggtaaggtgagacctagaaagacagagactggggtagcagatggtacaactccgagaatagaacagagaaaggaaactgatccccaggaagaaacagcctctctatggagaattgcccttccccttcactgcttacacaggtattagacctcctggaccctgcttcgggagacctggtaatccgagaagactgccgggggaatatcctgattccgggtctctcccagaagcccatcagtagctttgctgattttgagcggcacttcctgccagccagtcgaaatcggactgtaggagccacccggctcaaccagcgctcctcccgcagtcatgctgtgctcctggtcaaggtgaggccgcagacaggggcgaggacctgggaagcccaggagcctgagctaagcacgagacctttgttcttacccccaggtggaccagcgggaacgtttggccccatttcgccagcgagagggaaaactctacctgattgacttggctgggtcagaggacaaccggcgcacaggcaacaagggccttcggctaaaagagagtggagccatcaacacctccctgtttgccttgggcaaagtggtagatgcgctgaatcagggcctccctcgtgtaccttatcgggacagcaagctcactcgcctattgcaggtcaggcccacctgtctcagggaagaaggggctgcagaaggaggttctcaggcctgctgtggggtggggaatagcagttgaggcataggaaggctgggcttctgacccacccactgcctggtctcaccctcaggactctctgggtggctcagcccacagtatccttattgccaacattgcccctgagagacgcttctacctagacacagtctccgcactcaactttgctgccaggtccaaggaggtgatcaatcggccttttaccaatgagagcctgcagcctcatggtgagaactgggggaggcaggagtggaaacgctgggtctggaaattagggagtttgttgaaaccaccaagcatcagcacagaggctgaccacccccaatccctctctccaccccatcctccaatcatctagccttgggacctgttaagctgtctcagaaagaattgcttggtccaccagaggcaaagagagcccgaggccctgaggaagaggagattgggagccctgagcccatggcaagctccagcctctgcctcccagaaactcaggtgagcagtggggccttgggtgtatccccttcctgatgtatggcttagcagcagagctgcaatgcccgtcagatccttgagcagagagctgtgatcttgttcctctcccattaaattcaccctaggccggatgcggtggctcactcctgtaaccccagcactttgggagactgannnnnnnnnnnnnnnnnnnnnnnnnnnnnnnnnnnnnnnnnnnnnnnnnnnnnnnnnnnnnnnnnnnnnnnnnnnnnnnnnnnnnnnnnnnnnnnnnnnngaattcagaatcaggaaggagtagctgctgctgctgtgagagtcaggaaggaagagatgacttctagtgtttgcccacgtatgttctgatcctgtttttccaaggcactagcatggaaagcacaggagtgtccctgtcctccaggagccagttcacagcataggaagggagatgcattgttaagcttggcgtcatgggaaaggtggcatcaaactgacctggaaagattattgatacagatgtgaggaggtgtggggcaagattccaggcaaaataaatgaatgttagacgttgctgactgggcgcagtggctcacacctgtaatcccagcactttgggaggccaaggtgggtggatcacttgagcccaggagttcaagaccagcctgggcaacatagtaagaccccatctctacaaaaaataaaaaaattagctgggcatggtggcatgcacctgtggacccagctactcaggaggctgagacagggggattgcttaagcctcaggaggccaaggctatagtgagctgtgatctcaacactgcactccagcctgggtgacagagcaagaccctgtctcaaaaaaaaaaaaaaaaaaaaaaaaagaatgttaagccttaccgtgctcagagtcagtcaggactgcttgaacaggccttcccagctgcccacagcagggaagcttggcagctgaggtcttcggtggatttcaaagccctgctaaagatggcatcctctgtgatgttttccgcaactgctcctccaaatggataggcactgtcctggctgtcaccttattatggtctcttgatttcctcagtagacagtgcctccagggcagggcagtgtcttaggtctctcatacctggcactcaagtgttcgcctgatttcctggcatccccgagcagtcacttcacctgatgaagacactgcacccagagaaactggatgcctagcaagttaacattaggttctggagctacaggatataccaagttaaggtgtggtgaggggagtcctgctgctgtaggtggtgatgagggaggaggtaggtggggagcaacttctttttctgctcagccccctacagaagctaaagcagcatggacccggccatgtggagcgcctcctcagcttggaccgtctgcttgcctcccaggggagccaggggcccctctgttgagtaccccaaagcgagagcggatggtgctaatgaagacagtagaagagaaggacctagagattgaggtacgtgttttagggatgtgggaggtggattcctattggccttgagaagcaatccttggatcttcagacagggaaggacactcaggctggactagagtccagttttctcccaataccggaagttctccagcttctgcttgaatgtccttaacatggctgaactttgacagacaattgagaccagatgtgagggtgagaagaaaaagttcaaagtaaaagcaacaaatgttaaacattacatttcctaaagcccagctcaattaattgaggactgtgcttgaaaagcctttcccttcaatatttgcagaggcttgttccacctctgggtagccccctaatcacagaaagcccttaattatgttaggctccacctgtctcctggtaacctcccactggtcctagccctgccctctgggggctcagagccttgcatactcaccctggtaacccactcccttcaggctgccctggagttgggtctggatcacatctccctgatcctttccaacagaggcttaagacgaagcaaaaagaactggaggccaagatgttggcccagaaggctgaggaaaagagaaccattgtcccacaatgctccggccccctttcacatcgcacagtcacaggggcaaagcccctgaaaaaggctgtggtgatgcccctacagctaagtaagtttgactccaggggctggggggccaaggcagctgagatcctataagggaggaagtgttaggagcagctgtctccatgtcattcatattctcccaccacataccagtcccagggaggggtgaggaggctctgaggcagtgctgggggtgctctgccctcgggtgtttaggacagtgggatggacaaacgagtagaggattgaagataatgcaagactgactgaaattcctttaaatgcgggtataaaaaaggtcatgtggaaacacaacaggttaactctggatggaggggagctggggaatcagaaatggaagaatcgaagggctaccagggagggtgaaaagtaccctttgccctgactccaattctcgattcctactttcagttcaggagcaggcagcatccccaaatgccgagatccacatcctgaagaataaaggccggaagagaaaggtgaaagtagctgggggcttaggctacacctggagcccagaagtaagggggagtaggctctagggggaggagcgttggccttggggttaaacgaactggatgatggccgccagctactaacagacctcaacttgcttacccctggaatgtggtgatggatggttccttgcagggcatttagggtggaaggcagtgatgtggatgtacctcgcagagcggatgttccactgtgtagcctggcttctaccctctacaagcttaagagggaaaacttagggaactatgacctaagcagtcaagcaagaaaccacacatatgcacatacccagaatcgaacaccactagaactacccaaaaactgagatggttgggggaggtatcatttattcatattactttctcccatgtactttttgaaagacagcttattctttcccttttagagatgagggaccagatttaagagcttattttgtgctttacattcattaactcacttgatctccacagcaactccatgagaagggtgctaatattaccactgggtactgagtagtacctctctttcactagttgcataataagaattaacccagagagtgacctgagggcgggattttggacacacttgacaagagaggaagaggctggagcgcaggaggtagctggtgctgggctcctagtcttggcagaggagcccaaagcacttggctgccctgcgtgtcactcatctccctttgcctcccagctggagtccctggatgccctagagcctgaggagaaggctgaggactgctgggagctacagatcagcccggagctactggctcatgggcgccaaaaaatactggatctgctgaacgaaggctcagcccgagatctccgcagtcttcagcgcattggcccgaagaaggcccagctaatcgtgggctggcgggagctccacggccccttcagccaggtagcagcccactggactgggggagggcgggggcgggggagaccgggtacccccgagaccctgtcccctatcgatcctgtcccgccaggtggaggacctggaacgcgtggagggcataacggggaaacagatggagtccttcctgaaggtgaagtcacggccctgcccctcctctgcctgtcctgcgccccgcgcccctctctaacgtcgctgtctccctccctcctgtgttgcaggcaaacatcctgggtctcgccgccggccagcgctgtggcgcctcctgaccgtcgtctcctcactccgccttttcaaatttttgtataaccccgtgttgtgtaaatacagtttttgctccggtgcttccgcctgatttttggggctgcgggggcgggaccggggtgtgaccgcctcggggtgggccgcgagcaaggcaggcgactccactgggcgccatcttcggggaacgactcagcgcaggattgtaaatacaccgctggggtggggcggggaggacggtggcctgcaggacgcaaaaagcggaagccgaagcatgaggcctgcgaccgttaggcgggcgcgcgctcagggattagccccgccccgtccgtgcccccggcgcgcgcgctcccccattctcccgctcggcaacgacggcggccttgtgcgcgtgcgcgcgaaataacggccgctggcggagggagggggagtggaatcgttggcggggggaagaggagagaagccgccctgtctcccgcgcgcccaccacctgcgccatcgtcagccaatcagcagccgtctcaggggtctcgcgctcggggcgactcgggctgctgggtggctcccccgtccctcctcccgccagagtccctctcgcgcctgcccctcccgctggccacgcgcgcgctcgcgctagcgctcgcgcccgctccagcctcttgtgtgtcctcgcgccccccgcccgccctccccgcgcgtagtgtgctccgcttcccccaccctccacctcccccctcctgcccgccccgcgcgcctcctcccgggttccccctcccccaccgccgccgcctcctcctcccgccccagggtgagcgcgagccacctccctccctccctccgccatggatcccagcaactggagcagcttcatcttccaggtaacaactccctccccccgcccccacccccctgcccacaccccctcctgcccgccctccctcccgtcccaccccccctccgcgcgcccggtgcgcgcgcagctgtccccctccctccctcgcgccctcccccgccctccccgaggcgccggctgggcgcgcgcgcggcgggggccgaggctgctccctcgctccccccaccccgccccggcaggctccaaccgccgccgccgccgccgccgccgcccgggcccccgcccccggccccggccccgcggggcctcccgcccccacccagggggcgtcgccgccgccgtcgccgcggcgctccgcggcccgcaaggcgccctcctttcctccctcccgccggccggggtgcgcgggcggcggggcggcccgcgggccatgcgttcggcgcggcccagcccggccggccgggggcggcgccccgagcccgggccccgcgcggcccgcgcccccggcccccgctgagccctgggggccccgctgcggccgaggccatgttcccggtgtttccttgcacgctgctggccccccccttccccgtgctgggcctggactcccggggggtgggcggcctcatgaactccttcccgccacctcagggtcacgcccagaaccccctgcaggtcggggctgagctccagtcccgcttctttgcctcccagggctgcgcccagagtccattccaggtgagtagggccggccgcggcggcccgggctggggggggacgcccgcccgcacccgcggcccactcggcgccttgtctccgcaggccgcgccggcgcccccgcccacgccccaggccccggcggccgagcccctccaggtggacttgctcccggtgctcgccgccgcccaggagtccgccgcggctgctgcggccgctgccgccgctgctgccgccgtcgctgccgcgcccccggcccctgccgccgcctctacggtggacacagcggccctgaagcagcctccggcgccccctccgccacccccgccagtgtcggcgcccgcggccgaggccgcgccccccgcctccgccgccactatcgccgcggcggcggccaccgccgtcgtagccccaacctcgacggtcgccgtggccccggtcgcgtctgccttggagaagaagacaaagagcaaggggccctacatctgcgctctgtgcgccaaggagttcaagaacggctacaatctccggaggcacgaagccatccacacgggagccaaggccggccgggtcccctcgggtgctatgaagatgccgaccatggtgcccctgagcctcctgagcgtgccccagctgagcggagccggcgggggagggggagaggcgggtgccggcggcggcgctgccgcagtggccgccggtggcgtggtgaccacgaccgcctcggggaagcgcatccggaagaaccatgcctgcgagatgtgtggcaaggccttccgcgacgtctaccacctgaaccgacacaagctgtcgcactcggacgagaagccctaccagtgcccggtgtgccagcagcgcttcaagcgcaaggaccgcatgagctaccacgtgcgctcacatgacggcgctgtgcacaagccctacaactgctcccactgtggcaagagcttctcccggtgtgcacggggcctcggccgcccgctaggccgtggggagggagggacgcgacggaggtggcctgcccgtggctggcggggcagggaggcggctgctgaggctggggaaggggagccactcccacggcggagggaggaagcctctcccggttaccacgggagcaaggggtggtcctttgtcgacgaggtgggccttggggttgacggaagcttcgcgtgggaggaggcggcggcggcggcagcggctgctgggctccaggggagggatttcctgcttaagtgtcgctgtgacggcctgggctccgggaggaggcgcagggatcctcggaaaggcctgtggtgcggtttggtggatttggggcgcaccacctccgccctaaccccaaccccaacgtgtccccaggccggatcacctcaacagtcacgtcagacaagtgcactcaacagaacggcccttcaaatgtgaggtaggaagcccgcctcctcctgtcttggttttcatgattttgatcctcatggtagctgtctgagtcagtctctcagaccccctttttctctctcttctttttgcctttttgctccattttctcatcccttcttcaaggcctcatcatgtcactcccatttcctacagatcaaagatccccaaggctctgattcctttaatctcttgctcccccctccccagcccaccaagctttaactctcctgtgacaccccccacgcccctcccccctcctcagaaatgtgaggcagctttcgccacgaaggatcggctgcgggcgcacacagtacgacacgaggagaaagtgccatgtcacgtgtgtggcaagatgctgagctcggcttatatttcggaccacatgaaggtgcacagccagggtcctcaccatgtctgtgagctctgcaacaaaggtacatgccaagggctgccgggagggccaggggcaaagggtgggcgcctggccagacgccttgccacggatacgggttaagggtgctgtagccaagagctcgtggcgtctagattcctacaagaggtcaagggagcagcggggggacacctgaatgaacatcattagactctaagaagtcctggttggaagagatgatctgccagagaggttgaacctcctggtaatgtgtggggaaagcgggagtggaacttggctgctctggggaaggagtagtcaagaaagccagttccaggggtcacaaggcaaggtttccgctgcgcagccacaaggtcttgtctccagctcctggggcaggtggagtacacgggccgggctttaccagcacgcaccctgcacgggtagcagagaaagctgccttcagtcagactcaccggttaactgggttgagaccgcggggcactggagggaaggggacacagccgtctctgctgagggtcaaccctgcaagtggctaggagtcagtgtctcgtcatcctgggagaggtctcccggccatggagaatgagttctgtaggtaccaaggctgagaagcgggcaccacacaagccaggccccaggctcagggaggggctgtgtctaccagccccaacagagcagttggccccaggctaccaaggataccgtgggaggaggacagggccatctgaggagggcatcccccgcctaggagatcagccccgtctctggggtctccgcctggctgacccccgccccatcccaatccaccccccaataggcttcaccacggcagcatacctgcgcatccacgcggtgaaggaccacgggctccaggccccgcgggctgaccgcatcctgtgcaagctgtgcagcgtgcactgcaagacccctgcccagctggccggccacatgcagacccatctggggggggccgccccccctgtcccgggagacgccccccagccacagcccacctgctgagggggacccccgcacccaccaggcaaggcgtggggcatggctggggggcgggatggggggtgtgggggacaacggggctcaaagggcccaataggggatctcaggaaggcgagggatgcccatgtaccactcaggctagggagacttctgggcacagggaggatccttgagaactgctctgtctgggtgaggatgcaggctgaggcctctggggtccagataggaagtgagcaacggctgtgtcccaggggaagcaggctgggaaggtgtggggtgagggcaaggctcttgccattcagatcgcgctgtgatccgtggtgtttctcctgtgcaggtactggtgaggtttgtccaatggcggcggcagcggcagcggcggcagcggcagcagcggcagcagtagcagcccctcccacagctgtgggctccctctcgggggcggagggggtgcctgtgagctctcagccacttccctcccaaccctggtgagctccaagttggttgcgggggagaggggagaatggagtagagtcccttggtacaagctcctctcccccctcttttcccaccaactcctatttccctaccaaccaaggagcctccagaaggaaaggaggaagaaatgttttcttaggggaattcgctaggttttaacgatttgtttctcctgctcctcttctatcagacctgaccccacacaaacctgtcccctcggttgtgttgaagtcccctggacagtgggcaggggtggcagaggacacgagcagccactgcccgtaccccctctcctctctgtaagcccatgccctgtcttcccagggacttgtgagcctcttccctcgacggtcctcttctctccttccagtcctctccccctgctgtctgcagcccctccccggggagttggtgctttcttttccttttttttttttttccagggggagggaggagaggaaggagggggatcagagctgtcccaaagagggaaagcggtgaggtttgaggaggggcagaaccagggccggcaaaggttgtaccttcataaggtggtatggggggttggggtcaggccctgaacatcgtcctacttgagaatctgtcaggggaaaaagtcaaggggagcaggaggaagagccaggagggccagaggcagagaagagatggagtcttaggggccagggtgagcgaggggtccagggcctagaggtgcttcctgggggcgggggaatgcagccagtgtccccctcccctcttccaccccagctccagccctggtcttgtcttttcatccctcttccccacgacagaagaagttgtggccctggccatgtcatcgtgttcctgtgtcccctgcatgtaccccaccctccaccccttccttttgcgcggaccccattacaataaattttaaataaaatcctgtttctggctctggattgaatgaattgccctcactaagaactgccgccaaccccaagggtttcttctcggcctggtgtccgtcaatccagccttgctctgccctgtgaggctgtgaggttctggctccgccctccccaggggcagccttactggcggcagcacagatacagggcggggccaaggctgtggctgtggagagcaagttccaggtctttggggaattc

SEQ ID NO: 620 - DNA, 2595 bp, Homo sapiens
ctgaaggtaaaattttccagatacggcagacggctttcagagtacaataaacagggaatgagaactatttacatggaagtttctttctcatgatgcggtggagaagcctcggccacttggttctgccagatgttcctggggttactgtaaatgggaaggacaggcagagctaaacaaggtttatcatttaaaagtgcctgytgtgaagtcacttttgctggaaaactgcagcttggagctttctttgtattcacatcccactcttctgtcaagtacactttaccctgaccttatgagtggatgaagatacctcagttgtctgactttgccaattgcttaatttcagaatttaaaaaggggaaagaaaaacatcctgctaaaatatgaacatctgagtgtcttattttccaacatcgtcaatagctgtgagcgtcagcattaaatattctcccaaggagtgccatgatattgaagtcactttattaataacagctgtatctgcaaaacagtcaagagactcggacgttgaaagccagagatgacactgagcatgcttttattgcggcctaccatctttaagtgggacatattgattgatgagtgattgcctgtccatacactctctcatcatcctgttccttggattggacttcactaagcaatttatcactcaccttcagacttacatgtgggagttttcacaacagtagttttggaatcattagaacttggattgatttcatcatttaacagaaacaaacagcccaaattactttatcaccatggctttgaacgttgccccagtcagagatacaaaatggctgacattagaagtctgcagacagtttcaaagaggaacatgctcacgctctgatgaagaatgcaaatttgctcatccccccaaaagttgtcaggttgaaaatggaagagtaattgcctgctttgattccctaaagggccgttgttcgagagagaactgcaagtatcttcaccctccgacacacttaaaaactcaactagaaattaatggaaggaacaatttgattcagcaaaaaactgcagcagcaatgcttgcccagcagatgcaatttatgtttccaggaacaccacttcatccagtgcccactttccctgtaggtcccgcgatagggacaaatacggctattagctttgctccttacctagcacctgtaacccctggagttgggttggtcccaacggaaattctgcccaccacgcctgttattgttcccggaagtccaccggtcactgtcccgggctcaactgcaactcagaaacttctcaggactgacaaactggaggtatgcagggagttccagcgaggaaactgtgcccggggagagaccgactgccgctttgcacaccccgcagacagcaccatgatcgacacaagtgacaacaccgtaaccgtttgtatggattacataaaggggcgttgcatgagggagaaatgcaaatattttcaccctcctgcacacttgcaggccaaaatcaaagctgcgcagccgcggccgcggccacagtcatgactcagtcgactgccaaagcaatgaagcgacctctcgaagcaactgtagacctggcctttccccctggtgctcttcatcctttaccaaagagacaagcacttgaaaaaagcaatggtaccagcgcggtctttaaccccagcgtcttgcactaccagcaggctctcaccagcgcacagttgcagcaacacgccgcgttcattccaacagggtcagttttgtgcatgacacccgctaccagtattgtacccatgatgcacagcgctacgtccgccactgtctctgcagcaacaactcctgcaacaagtgtccccttcgcagcaacagccacagccaatcagataattctgaaataatcagcagaaacggaatggaatgccaagaatctgcattgagaataactaaacattgttactgtacatactatcctgtttcctcctcaatagaattgccacaaactgcatgctaaataaagatgtagttcttctggacagaccacaactctaagaagctagtgctgctatctcatatatgagtattaaatatggtatgcttagtatattccaacctaagatagttaactacctgagaccagctgtgatgtttaaagacataaaggataaagtttacttttaaagggtttctaaacatagtttctgtcctaggaatattgtcttatctccataactatatagctgatgcagaaagtccagccagtttactcatttcgattcagaatatttcaaatttagcaataaacaattagcattagttaaaaaagaaacatattccaagggcaggttcgattctagctctaattactgtcatgtcatttacccactggatcaaagggtatgtttcacttcttgacaatataaatgctgcagcaaagatgagaggtgaagtaaaaccgatacctgtcctgcaggtctaaaatttgaatggaaattcaagcacaagtactggggacacatcaaagtgtggtgtttggtttgcctggagatgccacgttgaatcatgtgattctagagtcgacctgcaggcatgc

SEQ ID NO: 621 - DNA, 828 bp, Homo sapiens
atctgccagagcctggagtctgcgaaggccgggacccggttccccggcccacagtgggggtgtgcaaacccgagagaactgggttgcaaattcgtgaagaatcagcatcatgtttggcagctgagtattggagccaggagcctgccatgaggttatattcccagaggatgtcagtcccaaggaccagtagctgccatcagtttggattctgaaaactaactggcatcaacactgggtgtagaaacatgcttgccttatgtatcagaggacatgctcagcagatccaagagatatatttggcaactttttctagaaaaggcacattgggtatcattcattacattcttgagtttttttgggtttttttttttttttttgagacagtcttgctgtattgcccaggctggagtgtggtggcacaatcacagctcattgcatcctcaatcacccaggcctaagcaatcctcccaccttgtagctgggactacagctcacagcacacctggctaaaattttttttttgttgagacggattctctatgttgcccaggctggtctcaggctcctgggctcagatggtcctcctgcctcagcttccaaaggcacaggccaagttgtagctttgtcccttgccatcatgcccaacaagaggttctataccttttaatgaattgactttcataaattggttatgttggtgggcaagttctttaagctggaaattgtaaattcctcctgaaatgttttttcatgcagttaccatgaactaatactacaataaaggatggtcttgggtgtcaaaaaaaaaaaaaaaaaaaaaaaaaaaaa

SEQ ID NO: 622 - DNA, 1549 bp, Homo sapiens
gctggcggggcccggacagaagatggtgcagaagaaaccagccgaacttcagggtttccaccgttcgttcaaggggcagaaccccttcgagctggccttctccctagaccagcccgaccacggagactctgactttggcctgcagtgctcagcccgccctgacatgcccgccagccagcccattgacatcccggacgccaagaagaggggcaagaagaagaagcgcggccgggccaccgacagcttctcgggcaggtttgaagacgtctaccagctgcaggaagatgtgctgggggagggcgctcatgcccgagtgcagacctgcatcaacctgatcaccagccaggagtacgccgtcaagatcattgagaagcagccaggccacattcggagcagggttttcagggaggtggagatgctgtaccagtgccagggacacaggaacgtcctagagctgattgagttcttcgaggaggaggaccgcttctacctggtgtttgagaagatgcggggaggctccatcctgagccacatccacaagcgccggcacttcaacgagctggaggccagcgtggtggtgcaggacgtggccagcgccttggactttctgcataacaaaggcatcgcccacagggacctaaagccggaaaacatcctctgtgagcaccccaaccaggtctcccccgtgaagatctgtgacttcgacctgggcagcggcatcaaactcaacggggactgctcccctatctccaccccggagctgctcactccgtgcggctcggcggagtacatggccccggagttagtggaggccttcagcgaggaggctagcatctacgacaagcgctgcgacctgtggagcctgggcgtcatcttgtatatcctactcagcggctacccgcccttcgtgggccgctgtggcagcgactgcggctgggaccgcggcgaggcctgccctgcctgccagaacatgctgtttgagagcatccaggagggcaagtacgagttccccgacaaggactgggcccacatctcctgcgctgccaaagacctcatctccaagctgctggtccgtgacgccaagcagaggctgagtgccgcccaagtcctgcaacacccctgggttcaggggtgcgccccggagaacaccttgcccactcccatggtcctgcagaggtgggacagtcacttcctcctccctccccacccctgtcgcatccacgtgcgacctggaggactggtcagaaccgttactgtgaatgagtgaagatcctggaggaccctggccccaggccagctcccatcgctgggggacggtgaacggccatgtgttaatgttacgatgtttttaaaagacaaaaaaaaaaaaaaaacctcaaaagtttttttaaagtgggggaaaaacatccaagcactttaattccaatgtaccaggtgaactgacggagctcagaagttttcctttacaccaactgtcaatgccggaattttgtattctgttttgtaaagatttaataaaagtcaaaaaacttgcaaaaaaaaaaaaaaa

SEQ ID NO: 623 - DNA, 1222 bp, Homo sapiens
gacatggcggtgcagccgaaggagacgctgcagttggagagcgcggccgaggtcggcttcgtgcgcttctttcagggcatgccggagaagccgaccaccacagtgcgccttttcgaccggggcgacttctatacggcgcacggcgaggacgcgctgctggccgcccgggaggtgttcaagacccagggggtgatcaagtacatggggccggcaggagcaaagaatctgcagagtgttgtgcttagtaaaatgaattttgaatcttttgtaaaagatcttcttctggttcgtcagtatagagttgaagtttataagaatagagctggaaataaggcatccaaggagaatgattggtatttggcatataaggcttctcctggcaatctctctcagtttgaagacattctctttggtaacaatgatatgtcagcttccattggtgttgtgggtgttaaaatgtccgcagttgatggccagagacaggttggagttgggtatgtggattccatacagaggaaactaggactgtgtgaattccctgataatgatcagttctccaatcttgaggctctcctcatccagattggaccaaaggaatgtgttttacccggaggagagactgctggagacatggggaaactgagacagataattcaaagaggaggaattctgatcacagaaagaaaaaaagctgacttttccacaaaagacatttatcaggacctcaaccggttgttgaaaggcaaaaagggagagcagatgaatagtgctgtattgccagaaatggagaatcaggttgcagtttcatcactgtctgcggtaatcaagtttttagaactcttatcagatgattccaactttggacagtttgaactgactacttttgacttcagccagtatatgaaattggatattgcagcagtcagagcccttaacctttttcagggttctgttgaagataccactggctctcagtctctggctgccttgctgaataagtgtaaaacccctcaaggacaaagacttgttaaccagtggattaagcagcctctcatggataagaacagaatagaggagagattgaatttagtggaagcttttgtagaagatgcagaattgaggcagactttacaagaagatttacttcgtcgattcccagatcttaaccgacttgccaagaagtttcaaagacaagcagcaaacaaaaaaaaaaaaaaaaaaa

SEQ ID NO: 624 - DNA, 2792 bp, Homo sapiens
ccggcggcggcggcggcggcgggctgcgagggcggcgggggcccgaacccggggccggcgggcggcaggaggcctcctcgggccgcggggggcgccaccgccggctcccggcagcccagcgtggagaccctggacagtcccacaggatcacatgttgaatggtgtaaacagcttatagctgctacaatttctagtcagatttcaggttcagtgacatcagaaaatgtgtccagagattacaaggctctaagggatggaaataagctggcacagatggaagaggctccacttttcccaggagaatcaattaaagccattgtgaaagatgtcatgtatatctgcccatttatgggagcagtgagtggaaccctgacagtgacggactttaagctgtacttcaaaaatgtcgagagggacccgcattttatccttgatgttccccttggagtgatcagcagagtggagaagattggagcacagagccatggagacaattcctgtggtatagagatagtgtgcaaggatatgaggaacttgcggcttgcttataaacaggaagaacagagtaaactagggatatttgaaaacctcaacaaacatgcatttcctctttctaacggacaggcactatttgcattcagctataaagaaaaatttccaattaatggctggaaagtttatgatccagtatctgaatataagagacagggcttgccaaatgagagttggaaaatatccaaaataaacagtaattatgagttctgtgacacctaccctgccatcattgttgtgccaactagtgtaaaagatgatgacctttcaaaagtggcagcttttcgagcaaaaggcagagtccctgtgttgtcatggattcatccggaaagtcaagcaacgattacccgttgcagccagccacttgtgggtcccaatgataagcgctgcaaagaggatgaaaaatacttgcaaacaataatggatgctaacgcacagtcacacaagcttatcatctttgatgctcgacaaaacagtgtcgctgataccaacaagacaaagggtggaggatatgaaagtgaaagtgcttacccaaatgcagaacttgtgttcttggagatccacaacattcatgtcatgcgagagtcactacgcaaattaaaagagattgtgtacccttcgatcgatgaggcgcggtggctctccaatgtggatgggacgcattggctggaatatataaggatgctgcttgctggggcagtaagaattgctgataaaatagaatctgggaaaacatctgtggtggtgcattgcagcgacggttgggaccgaacagcccagctcacatctctggctatgctaatgttggacagttactacaggaccattaaaggatttgaaactctcgtagaaaaggagtggataagctttggacacaggtttgcactgcgagtgggccatggtaatgacaaccatgcggatgctgaccgatctcccatatttctgcagtttgttgattgtgtttggcaaatgacaaggcagtttccttcagcattcgagtttaatgagctattcttgattacaattttggatcacctttatagctgtctttttgggacctttttgtgcaactgtgaacagcagcgattcaaagaggcatggggggctgggacccagcgagcccgtggctctctcaggagtagatgagtgctagaccctggacctcctgactccgagttcatgtagtctccgctgcaccaactccaaaaccgtgggattctgcttttcatcctctgtggtgttggccagatcatacttgaaggccttggaaatggagtctgctgattagccaaaaagcccactttaggatgtatatacaaagacgatatctttatggtcgtatatcaatagccagctagacgagttttctaatcccttctttgtgaattatgaaaaccacgtgttatatcctgttgctagtctgagtcatttggaattgtgggtaaattattatgtacgatggaatccacggatgagacctcagatgcccattcaccagaatctcaaggagctgctggccgtcagggcggagctgcagaagcgtgtggagggtctacagcgggaggtggccacgcgcgccgtctcatcctcatctgagcggggctcctcgccctcccactccgccacctccgtccacacctcggtctgatgggcgagaaatatgtaatcccctggctgactaggactgttaaacatagtgtggactggatgatgccttcgacaaaccagagaagccaagttggggggagctggtgcctggagtgggccctgtgcacctcacctggcggaggctggggggggctctgtcagcaggaccctagaggagactctcattcgattttaaagaagcacaacgggtcattttcctttgtatgttcctagcgcagaactgtttctaaaacaacttgaagtatagttttgttatctaagcaatttttgttttaagtaagtaagtgtactagaatgcgaagccgttatggttcaggtttttaaaaactggtacagtattgtatttgtctcatctgttgcactgtatttcaatcatctgtaattaaaatgatcatatgtttgctccctggtcttttttaagtaagtaagtaagtatcttagtagatttttcctttgaggaaaatcggtaataaaataacatggattgaatgtttactgtgcgtcaagcacagttaatatatgatgatgtaaagtaactaactttatgtgatttaattcattcagtaaattgt

SEQ ID NO: 625 - DNA, 1427 bp, Homo sapiens
cctctcgctgccgtccaggtgcaccgcctgcctctcagcaggatggacgtgatggatggctgccagttctcaccttctgagtacttctacgacggctcctgcataccgtcccccgagggtgaatttggggacgagtttgtgccgcgagtggctgccttcggagcgcacaaagcagagctgcagggctcagatgaggacgagcacgtgcgagcgcctaccggccaccaccaggctggtcactgcctcatgtgggcctgcaaagcctgcaagaggaagtccaccaccatggatcggcggaaggcagccactatgcgcgagcggaggcgcctgaagaaggtcaaccaggctttcgaaaccctcaagaggtgtaccacgaccaaccccaaccagaggctgcccaaggtggagatcctcaggaatgccatccgctacatcgagagcctgcaggagttgctgagagagcaggtggagaactactatagcctgccgggacagagctgctcggagcccaccagccccacctccaactgctctgatggcatgcccgaatgtaacagtcctgtctggtccagaaagagcagtacttttgacagcatctactgtcctgatgtatcaaatgtatatgccacagataaaaactccttatccagcttggattgcttatccaacatagtggaccggatcacctcctcagagcaacctgggttgcctctccaggatctggcttctctctctccagttgccagcaccgattcacagcctcgaactccaggggcttctagttccaggcttatctatcatgtgctatgaactaattttctggtctatatgacttcttccaggagggcctaatacacaggacgaagaaggcttcaaaaagtcccaaaccaagacaacatgtacataaagatttcttttcagttgtaaatttgtaaagattaccttgccactttataagaaagtgtatttaactaaaaagtcatcattgcaaataatactttcttcttctttattattctttgcttagatattaatacatagttccagtaatactatttctgatagggggccattgattgagggtagcttgttcgaatgcttaacttatatatacatatatatatattataaatattgctcatcaaaatgtctctggtgtttagagctttatttttttctttaaaacattaaaacagctgagaatcagttaaatggaattttaaatatatttaactatttcttttctctttaatcctttagttatattgtattaaataaaaatataatactgcctaatgtatatattttgatcttttcttgtaagaaatgtatcttttaaatgtaagcacaaaatagtactttgtggatcatttcaagatataagaaattttggaaattccaccataaataaaattttttactacaag

SEQ ID NO: 626 - DNA, 3311 bp, Homo sapiens
cgcgctgggagaagacttcgccgctcggggccgcagcctgttgggcaaggcgagcatcatggcctcggattgcgagccagctctgaaccaggcagagggccgaaaccccaccctggagcgctacctgggagccctccgtgaggccaagaatgacagcgagcagtttgcagccctgctgctagtgaccaaggcagtcaaagcaggtgacatagatgccaaaactcggcggcggatcttcgatgctgtcggcttcaccttccccaatcgtctcctgaccaccaaggaggcgccggatggctgccctgaccatgttctgcgggctttgggtgtggccctgctggcctgcttctgcagtgaccctgaactggccgcccatccccaagtcctgaacaagattcccattcttagcaccttcctcacagcccggggggacccggacgatgctgcccgccgctccatgattgatgacacctaccagtgcctgacggctgtagcaggcacacccagagggcctcggcacctcattgctggtggcaccgtgtctgccctatgccaggcatacctggggcacggctatggctttgaccaggccctggcactcctggtggggctgctggctgctgccgagacacagtgctggaaggaggcggagcccgacctgctggccgtgttgcggggcctcagtgaggatttccagaaagctgaggatgccagcaagtttgagctctgccagctgctgcccctctttttgcccccgacaaccgtgccccctgaatgctaccgggatctgcaggccgggctggcacgcatcctgggaagcaagctgagctcctggcagcgcaaccctgcactgaagctggcagcccgcctggcacacgcctgcggctccgactggatcccggcgggcagctccgggagcaagttcctggccctgctggtgaatctggcgtgcgtggaagtgcggctggcactggaggagacgggcacggaggtgaaagaggatgtggtgaccgcctgctatgccctcatggagttggggatccaggaatgcactcgctgtgagcagtcactgcttaaggagccacagaaggtgcagctcgtgagcgtcatgaaggaggccataggggctgttatccactacctgctgcaggtggggtcagagaagcagaaggagccctttgtgtttgcctcggtgcggatcctgggtgcctggctggccgaggagacctcatccttgcgtaaggaggtgtgccagctgctgcccttcctcgtccgctatgccaagaccctctacgaggaggccgaggaggccaatgacctttcccagcaggtggccaacctggccatctcccccaccaccccagggcccacctggccaggagacgctctccggctcctcctgcctggctggtgccacctgaccgttgaagatgggccccgggagatcctgatcaaggaaggggccccctcgcttctgtgcaagtatttcctgcagcagtgggaactcacatcccctggccacgacacctcggtgctgcctgacagcgtggagattggcctgcagacctgctgccacatcttcctcaacctcgtggtcaccgcaccggggctgatcaagcgtgacgcctgcttcacatctctaatgaacaccctcatgacgtcgctaccagcactagtgcagcaacagggaaggctgcttctggctgctaatgtggccaccctggggctcctcatggcccggctccttagcacctctccagctcttcagggaacaccagcatcccgagggttcttcgcagctgccatcctcttcctatcacagtcccacgtggcgcgggccaccccgggctcagaccaggcagtgctagccctgtcccctgagtatgagggcatctgggccgacctgcaggagctctggttcctgggcatgcaggccttcaccggctgtgtgcctctgctgccctggctggcccccgctgccctgcgctcccgctggccgcaggagctgctccagctgctaggcagtgtcagccccaactctgtcaagcccgagatggtggccgcctatcagggtgtcctggtggagctggcgcgggccaaccggctgtgccgggaggccatgaggctgcaggcgggcgaggagacggccagccactaccgcatggctgccttggagcagtgcctgtcagagccctgaggggtgtccaccggggacagacccaggggcgggcagagagggaaggagggaggaggcatcttccctgaagcccccaatctggcccccccctccccagacttcctccccaaaacaccccagctttctggcttttctgagggcaagggcatggtgcccacccctcaagtgtaaggaactgcgttccgccctcaggcccccatgggggcagggatcggcttggaaatcaacgtggttgtccccgccaggccggggaaggttggagcagcccccagggaggggggcactaggtgtcattgtgcccgatgtctggctcccctgcaggagggaggctccagggtaagacagggctggcaggagcagactgcctcagcccatgtgccctgccggccagggcgtgggctcccctcggctgtggtgcctcctctggccccccaggtccacgtcctttaaattggccctttggctcttgcccttggctcccttgggcagacagcaggcttaggccattgatatcgcagttcttcctatcagcttcagtgacccagggtctgaactgcctccatcctagggcaacctggggcagacaggcctggtggggggtggggaaacctccttccacctgagcttgcttgaagggacccagagtctttgggcccagatctttaaacctttgtgtcgtgttgcagcagagtgacgatgggggttggggggttatttattttgcctgtccttatccctgcttggacacctgagcatctgattcctgtccccctggtgccatctggcctggctggagccaggaacaggagggacacttccccagaatccgcatgtttccccagtgattacactccactgccaccgtggtgcctggctttaactcccacccctgctatgactcctctctgcagagacgcgactggcggctccagcagggactacctttcttataaacccagggggaccacacacacacacacacacacacacacacacacacacacacacacacacacacacactcttgatcccttgcttccctcccccagtgcgttctgtgatcgccaagttcaaagctgtgcacatgtggacactcaataaatgttcattggtg

SEQ ID NO: 627 - DNA, 104 bp, Homo sapiens
tgggaggccaagagcatttcgctcacttgctgatcctcagggacaccaagacctacatgcttgcttttgacgtgaacgatgagaagaactgggggctgtctatg

SEQ ID NO: 628 - DNA, 1336 bp, Homo sapiens
gtcagtcgcgagcgaacgaccaagagggtgttcgactgctagagccgagcgaagcgatgcctaaatcaaaggaacttgtttcttcaggctcttctggcagtgattctgacagtgaggttgacaaaaagttaaagaggaaaaagcaagttgctccagaaaaacctgtaaagaaacaaaagacaggtgagacttcgagagccctgtcatcttctaaacagagcagcagcagcagagatgataacatgtttcagattgggaaaatgaggtacgttagtgttcgcgattttaaaggcaaagtgctaattgatattagagaatattggatggatcctgaaggtgaaatgaaaccaggaagaaaaggtatttctttaaatccagaacaatggagccagctgaaggaacagatttctgacattgatgatgcagtaagaaaactgtaaaattcgagccatataaataaaacctgtactgttctagttgttttaatctgtctttttacattagcttttgttttctaaatgttctccaagctattgtatgtttggattgcagaagaatttgtaagatgaatacttttttttaatgtgcattattaaaaatattgagtgaagctaattgtcaactttattaaggattactttgtctgcccaccacctagtgtaaaataaaatcaagtaatacaatcttaactgttgtggccttttttgatcataagagttggtactgtttaaggccaaaagtaacagtttttatagatcttttagtttcaactcagcttttacaataaaaaggatttgtattgcattgagtttataaacttttggtttgtgaacttcatatttgatcttttctcttccaatcaaatgtctaggcttgtttgacttccacccccaatggtttttcactctttttatttacttcattttcctttaataacttaatctcttcatgttcagtttttacttcactctttattcttttctttgattatggtatgcttatttggaaagtcagtgaaactgtcaaaatgttatctcaataagatacttatatgagaactacaatcaccgaatctactgtattcaatattagcagatctaatttgataaacaacatggcttgtgtgaaaactgagcaggtgtttgtttacccatagtgttctgtgtagttattgcttagtctgcagaaaataatgacttagatgagatgtctgacttgctttcacttattaaacatgttcaccatgggatgatgtctgtaacatcagatattgttcaactagactaggatttaataaaaattgtgaaagcttaaaaaaaaaaaaaaaaaaaaaaaa

SEQ ID NO: 629 - DNA, 2474 bp, Homo sapiens
atagcacagctgccagtagacccccggtcaccctgaggctggtggtccctgctagtcagtgtggctctctcattggaaaaggtggatgcaagatcaaggaaatacgagaggctggagtgcagtggcgcagtcatggctcactgcagcaaaacatcgaccttcccagcctcaggcgatcctctcatctcagcctcccaaggagccgggactgcaggctcccaccaccacacccaaatttttgtatttttttgtaaaaatggtgttttgccatgtggcccaggctggtttcgaactcctgagctcaagcaatccacccacctcaggctcccagtgttattactacaggcttgagccagcacacttgcttgcctgcagcgtcatttttcttgaccagacttataaacaacaaggagaaaaataggaagatgtattgggaaatagatgtaattctacatcttttttttttttttgagacagggtctcactcaggctgaagtgcagggcataatcgtgatcatggcttactgcaacctcgacttctgggctcatgtaaccctcctacctcaagcctcctgagtacctggtaccataggcgcgctccacaatgcccggctaatttttcttctttctgttgttgtagagacgagtctcactgttttgctcaggctggtctccaactcctgagcttccgatgattcgactgccttggtctcccaaagtgctcggattacagatgtgagccactgtgcctggcccctacttcctgtttaactatggaagttacgttgaattatggaagattttaattgtatctagatgttactgaatttggtgttggaatgaaactcgaatggctgcttgagtttttgggagcgtatcgtacatggcacgacagagatcttaattttgttaattgctatattcgaagcacttctcatggtacctggcacatagaatggccttgatgtaaatattttttcagtaacataatgaaaggtgggtgatacttgtggggcttttgcttcgcccagagaactatcattagttgaaaggcaactatttagaaggaccttttgcttgagagtaggttaaatttaggctgttattcacgcttattcttgtctttcagtggctaatttatttttaactctaattcactaaacagtcctatctggaataagggaagagtgggacaaagaacaaaaagggaagattggaaatggataaatatctactagagttttaggctctgaaattgctgctggaggaattggaagagcatgaactgtttttctctgattttgaatttctttttactccaaagagtacaggggctcaggtccaggtggcaggggatatgctacccaactcaactgagcgggccatcactattgctggcattccacaatccatcattgagtgtgtcaaacagatctgcgtggtcatgttggagactctctcccagtcccccccgaagggcgtgaccatcccgtaccggcccaagccgtccagctctccggtcatctttgcaggtggtcaggacaggtacagcacaggcagcgacagtgcgagctttccccacaccaccccgtccatgtgcctcaaccctgacctggagggaccacctctagaggcctataccattcaaggacagtatgccattccacagccagatttgaccaagctgcaccagttggcaatgcaacagtctcattttcccatgacgcatggcaacaccggattcagtggcattgaatccagctctccagaggtgaaaggctattgggcaggtttggatgcatctgctcagactacttctcatgaactcaccattccaaacgatttgattggctgcataatcgggcgtcaaggcgccaaaatcaatgagatccgtcagatgtctggggcgcagatcaaaattgcgaacccagtggaaggatctactgataggcaggttaccatcactggatctgctgccagcattagcctggctcaatatctaatcaatgtcaggctttcctcggagacgggtggcatggggagcagctagaacaatgcagattcatccataatccctttctgctgttcaccaccacccatgatccatctgtgtagtttctgaacagtcagcgattccaggttttaaatagtttgtaaattttcagtttctacacactttatcatccactcgtgattttttaattaaagcgttttaattcctttctctgttcagctgttgatgctgagatccatatttagttttataagcttctccctggtttttttttttttttggttttttttttttggctcatgaatttttctgtttgtcatggaaatgtaagagtggaatattaatacatttcagtttagttctgtaatgtcaggaatttttcaaaaaaattaaaagatggactggagctttttctttgtgaatagaaactggatgccacagtgattcatgtgggttttat

SEQ ID NO: 630 - DNA, 1007 bp, Homo sapiens
ctgaccacagagcgctgctcccgagaaccctgcacccctcaatggagtaaattaccataaagcctcttccttacccatgctttggggtgttaacagctgaggctattcgtcggtgacctgtgggactcgagctattcctgcagctcagcagacctcctggccgtggcagacttctgcgttatgacccggctgctgggctacgtggaccccctggatcccagctttgtggctgccgtcatcaccatcaccttcaatccgctctactggaatgtggttgcacgatgggaacacaagacccgcaagctgagcagggccttcggatccccctacctggcctgctactctctaagcatcaccatcctgctcctgaacttcctgcgctcgcactgcttcacgcaggccatgctgagccagcccaggatggagagcctggacacccccgcggcctacagcctgggcctcgcgctcctgggactgggcgtcgtgctcgtgctctccagcttctttgcactggggttcgctggaactttcctaggtgattacttcgggatcctcaaggaggcgagagtgaccgtgttccccttcaacatcctggacaaccccatgtactggggaagcacagccaactacctgggctgggccatcatgcacgccagccccacgggcctgctcctgacggtgctggtggccctcacctacataatggctctcctatacgaagagcccttcaccgctgagatctaccggcagaaagcctccgggtcccacaagaggagctgattgagctgcaacagctttgctgaaggcctggccagcctcctggcctgccccaagtggcaggccctgcgcagggcgagaatggtgcctgctgctcagggctcgcccccggcgtgggctgccccagtgccttggaacctgctgccttggggaccctggacgtgccgacatatggccattgagctccaacccacacattcccattcaccaataaaggcaccctgacccca

SEQ ID NO: 631 - DNA, 1618 bp, Homo sapiens
ttttcttttgaacagagtctcactctgtcaccaggctgaagtgaagtgggccgatctcagctcactgcaaactccacctcccaggttcaagcgattctcctgtctcagcctcctgagtagctgggactacaggcacatgccaccacgcccagctaatttttgtatttttagtagagatggagtttcgccatgttggccaggctggtctcgaactcctggcctcagatgagccacctgcctcggcctcccaaagtgctaggattatagaaatgagccactgcggccagcctggacttcctcttctgagtgccctgctgacctgccctgatgatgactgttcctgcagaggtctgcgggacccccagttacctggcccctgagattatcgagtgctccatgaatgaggaccacccgggctacgggaaagaggtggacatgtgagtgcaccgggaaaggaggagcacccagctaggctgggcaagggaggaagtaggcagggctgggccggtgcccctggcgctgggtaagtggccctgggccctcgcatgtccaggtggagcactggcgtcatcatgtacacgctgctggccggctccccgcccttctggcaccggaagcagatgctgatgctgaggatgatcatgagcggcaactaccagtttggctcgcccgagtgggatgattactcggacaccgtgaaggacctggtgagaggccaggccaactggctcctgggctcagggctgcgatgccaggcgcccctgcccggggaggccctgcctttcctgacatgctggaggggacctgccttgacattctcggttcccctctcctcctctcacaggtctcccgattcctggtggtgcaaccccagaaccgctacacagcggaagaggccttggcacaccccttcttccagcagtacttggtggaggaagtgcggcacttcagcccccgggggaagttcaaggtactaagcgtcctgatccaggcccgccagctccctaagtgcaaacctctaagccccctcctctcccaggagtccttacaccccgtgaatttccagagtacccatccctcccctcccagctgccctgtgatggcttcaaagacggcaggtgtcagcccactggctcggtccctgaggatgctggccaagtgggaagtgggggacactaggaaggccccgcagaagccacccaaggcttcgtggcaaacgagcccagagcgtccctgtgctggaggggcagggcctggcagggcgggggctgcagcccagcttctccgcctggccctgcaggtgatcgctctgaccgtgctggcttcagtgcggatctactaccagtaccgccgggtgaagcctgtgacccgggagatcgtcatccgagacccctatgccctccggcctctgcgccggctcatcgacgcctacgctttccgaatctatggccactgggtgaagaaggggcagcagcagaaccgggcagcccttttcgagaacacacccaaggccgtgctcctctccctggccgaggaggactactgaggggctggccagtcagggagggctagggggcaggtggggaggggaagccatggaaatacaagtcaaaggggt

SEQ ID NO: 632 - DNA, 3227 bp, Homo sapiens
cccgtatccgcatccacatccacatccacactctcatcctcactcgcacccacaccctcacccgcacccgcatccgcaccaaataccgcacccacacccacagccgcactcgcagccgcacgggcaccggcttctccgcagcacctccaactctgcctgaaaggggcagctcccgggcaagacaaggttttgaggacttgaggaagtgggacgagcacatttctattgtcttcacttggatcaaaagcaaaacagtctctccgccccgcaccagatcaagtagtttggacatcaccctactgaacaacttggcgattcttcttagttttctgcatacttttcatcaccgatgcaggaaacgatttcgagtcaagaagacttttatttatgaacctttgaaaggatcgtcttgtatggtgaattttctaggagcgatgatgtactgtaattttattttaatgtattttgatttatgattatttattagttttttttaaatgcttgttctaagacatttctgaatgtagaccattttccaaaaaggaaactttattttcaaaaacctaatccgtagtaattcctaatcttggagaataaaaaagggcggtggaggggaaaacattaagaatttattcattatttctcgagtactttcagaaagtctgacactttcattgttgtgccagctggttgaaattaaaactctgatattactttttttgaggatttttatttttgtttttgcttaaacactatagtttgtctagaagtttaaaaagctaaaagttaaaaatggtgtaattatgaaaatctaacactcaagatagtttctaaaaggaaatcagtagttaaggatacctgatttcaaaatatttaaagcataacctaactgatggtaggatgattgtatcttgaatatgtggtagggccacatctattgtaggaaaaccttgcttttatcatctgtgtgtaaagggcttaataaggagaagaggccttttgactgatttgtgagtataaatgcatttgctgtttcatttcaaaaatgttgtggaggaaaagagtacatttaacttgtataagagaatatttgtactcctgtccaggctgcaggacctttcttcgagagctttgcacacttgacttgaaccacattttctgatccctttactttgttttagaagcacactgaaaaatctcgttgtttaaagtacaatttgtaaatatttcaaaggtctaggagtcataacttttgttttcatactgaaaatgatgttgatcagagaaaccaactgttttgcttttcattgctctgtgagaaattgaggattctgttttgctgttaggtaagctaactcagaaattgaaaggaaagactggataaacaccggattttcagtaagaaaacaaccccagtcttgtcttagaagccacttgttgaggagtctgttgggggaaaaaagaggatatgcttttaaaggtagaacaaaccttcttctgtgttaaatcaaaaggatgttcaaaatccaccaggacagatgctacttgggtttaaatggagccatagatgatacaaagtcctcttggggctgaaaatcacttcctatttgcatggctttactaactggtttctgttttccattatctttttcacagaaagtcttggtcagtatttttccagcatttaaattgaaacggtcagtattagaccactgctaggttatgtagtcaagaaataaaaatagaattacatgctacagatgtctttattctccttccatctagaaaggagttccaaggtcaaattactttttagtgcaatagttaaatgacattttgagatcataactcatatccaaaaagttgcagggaaaattaaaatagctttcccctattaagctaatggcaaacaaaacttaagtggacccccacttccagtggttgtttaggttgcagttgtgaaaatatgctgccaacatttaaaaacttgtttcatatgtatatatgtatacacatatatgaatatgtatgtatatatacatatatgagaacatgtgtgtacacatatatgaatatgtatatatgtgtatgtatgtatatatgtatatgaaatgagagccacatctaaagatttcttaaatcaagtttggttcagcttccttagaactgtggctgtactttttgaggagtacctcatagtactatatttttaatgcatgcaaatcataatagctccaaatgaaccacagttttttcccaatggaggatttttttttaattcttgtactaaaaaaaaaaaatccataccaaatatttttacaaattaagattgatgtaggttttaaaaaaggcatttgtatgttgttagcttacatatggggctaggtaatttcattgcttaaaaagatgcgcctaggctccctcttggtggctggatttctttttcttcgcccgtggtggccatggtttttaatagggccaccggaatcatggtttcttttttttttttttttttggagatggagtctcgccctgtgacccaggctggagtgcagtggcacgatctcggctcactgcaacctctgcctcttgggttcacgccattctcctgtgtcagcctcctgagtagctgggactacaggtgaatgccaccacgcccggctgatttttgtatttttagtagagatggggtttcaccatagtggtcaggctgttctcgaactcctgacctcaggtgatccacctgccttggcctcccaaagtgctaggattacaggtgtgagccaccacacccggccccagagtaatggtttcttgactttctgtagcccttgttccttagtctgctgtgatatttatgttgacctttatcattttctattctgaacccctcttagcatttaatgtgaaatctaagaaattagaagtagaatggcttttattgttttgacacctttgaaattattattaataatttttccagagcaaaaaagcaaacacgctcaataagactaaacaaaacaaaatataaatgtacatcatttaatgtcccagtggctctattctacctgtaagaaaatgatacaaaaccacctaagatattttgaagcctgacaaatcagcttcatggaaaaaggtaaaaaatgcatttttcaaccgaaagggcagatccaatagaagacccgctccttaaataaacataaaatgtaaaaagttggaaaaaaaaa

SEQ ID NO: 633 - DNA, 1158 bp, Homo sapiens
ggggactatcctctggaggctgtgcgcatgcagcacctgattgcccgtgaggcagaggctgccatctaccacttgcaattatttgaggaactccgccgcctggcgcccattaccagcgaccccacagaagccaccgccgtgggtgccgtggaggcctccttcaagtgctgcagtggggccataatcgtcctcaccaagtctggcaggtctgctcaccaggtggccagataccgcccacgtgcccccatcattgctgtgacccggaatccccagacagctcgtcaggcccacctgtaccgtggcatcttccctgtgctgtgcaaggacccagtccaggaggcctgggctgaggacgtggacctccgggtgaactttgccatgaatgttggcaaggcccgaggcttcttcaagaagggagatgtggtcattgtgctgaccggatggcgccctggctccggcttcaccaacaccatgcgtgttgttcctgtgccgtgatggaccccagagcccctcctccagcccctgtcccacccccttcccccagcccatccattaggccagcaacgcttgtagaactcactctgggctgtaacgtggcactggtaggttgggacaccagggaagaagatcaacgcctcactgaaacatggctgtgtttgcagcctgctctagtgggacagcccagagcctggctgccccatcatgtggccccacccaatcaagggaagaaggaggaatgctggactggaggcccctggagccagatggcaagagggtgacagcttcctttcctgtgtgtactctgtccagttcctttagaaaaaatggatgcccagaggactcccaaccctggcttggggtcaagaaacagccagcaagagttaggggccttagggcactgggctgttgttccattgaagccgactctggccctggcccttacttgcttctctagctctctaggcctctccagtttgcacctgtccccaccctccactcagctgtcctgcagcaaacactccaccctccaccttccattttcccccactactgcagcacctccaggcctgttgctatagagcctacctgtatgtcaataaacaacagctgaagcaaaaaaaaaaaaaaaaaaaaaaaaaaaaaaaaaaaaaaaaaaaa

SEQ ID NO: 634 - DNA, 1400 bp, Homo sapiens
agagaagacgtgcagggaccccgcgcacaggagctgccctcgcgacatgggtcacccgccgctgctgccgctgctgctgctgctccacacctgcgtcccagcctcttggggcctgcggtgcatgcagtgtaagaccaacggggattgccgtgtggaagagtgcgccctgggacaggacctctgcaggaccacgatcgtgcgcttgtgggaagaaggagaagagctggagctggtggagaaaagctgtacccactcagagaagaccaacaggaccctgagctatcggactggcttgaagatcaccagccttaccgaggttgtgtgtgggttagacttgtgcaaccagggcaactctggccgggctgtcacctattcccgaagccgttacctcgaatgcatttcctgtggctcatcagacatgagctgtgagaggggccggcaccagagcctgcagtgccgcagccctgaagaacagtgcctggatgtggtgacccactggatccaggaaggtgaagaagggcgtccaaaggatgaccgccacctccgtggctgtggctaccttcccggctgcccgggctccaatggtttccacaacaacgacaccttccacttcctgaaatgctgcaacaccaccaaatgcaacgagggcccaatcctggagcttgaaaatctgccgcagaatggccgccagtgttacagctgcaaggggaacagcacccatggatgctcctctgaagagactttcctcattgactgccgaggccccatgaatcaatgtctggtagccaccggcactcacgaaccgaaaaaccaaagctatatggtaagaggctgtgcaaccgcctcaatgtgccaacatgcccacctgggtgacgccttcagcatgaaccacattgatgtctcctgctgtactaaaagtggctgtaaccacccagacctggatgtccagtaccgcagtggggctgctcctcagcctggccctgcccatctcagcctcaccatcaccctgctaatgactgccagactgtggggaggcactctcctctggacctaaacctgaaatccccctctctgccctggctggatccgggggacccctttgcccttccctcggctcccagccctacagacttgctgtgtgacctcaggccagtgtgccgacctctctgggcctcagttttcccagctatgaaaacagctatctcacaaagttgtgtgaagcagaagagaaaagctggaggaaggccgtgggcaatgggagagctcttgttattattaatattgttgccgctgttgtgttgttgttattaattaatattcatattatttattttatacttacataaagattttgtaccagtggaaaaaaaaaaaaaaaaaaaaaaaaaaaaaaaaaaaaa

SEQ ID NO: 635 - DNA, 2077 bp, Homo sapiens
ccgagcgccagcgcggggaaccgggaaaaggaaaccgtgttgtgtacgtaagattcaggaaacgaaaccaggagccgcgggtgttggcgcaaaggttactcccagacccttttccggctgacttctgagaaggttgcgcacagctgtgcccggcagtctagaggcgcagaagaggaagccatcgcctggccccggctctctggaccttgtctcgctcgggagcggaaacagcggcagccagagaactgttttaatcatggacaaacaaaactcacagatgaatgcttctcacccggaaacaaacttgccagttgggtatcctcctcagtatccaccgacagcattccaaggacctccaggatatagtggctaccctgggccccaggtcagctacccacccccaccagccggccattcaggtcctggcccagctggctttcctgtcccaaatcagccagtgtataatcagccagtatataatcagccagttggagctgcaggggtaccatggatgccagcgccacagcctccattaaactgtccacctggattagaatatttaagtcagatagatcagatactgattcatcagcaaattgaacttctggaagttttaacaggttttgaaactaataacaaatatgaaattaagaacagctttggacagagggtttactttgcagcggaagatactgattgctgtacccgaaattgctgtgggccatctagaccttttaccttgaggattattgataatatgggtcaagaagtcataactctggagagaccactaagatgtagcagctgttgttgtccctgctgccttcaggagatagaaatccaagctcctcctggtgtaccaataggttatgttattcagacttggcacccatgtctaccaaagtttacaattcaaaatgagaaaagagaggatgtactaaaaataagtggtccatgtgttgtgtgcagctgttgtggagatgttgattttgagattaaatctcttgatgaacagtgtgtggttggcaaaatttccaagcactggactggaattttgagagaggcatttacagacgctgataactttggaatccagttccctttagaccttgatgttaaaatgaaagctgtaatgattggtgcctgtttcctcattgacttcatgttttttgaaagcactggcagccaggaacaaaaatcaggagtgtggtagtggattagtgaaagtctcctcaggaaatctgaagtctgtatattgattgagactatctaaactcatacctgtatgaattaagctgtaaggcctgtagctctggttgtatacttttgcttttcaaattatagtttatcttctgtataactgatttataaaggtttttgtacattttttaatactcattgtcaatttgagaaaaaggacatatgagtttttgcatttattaatgaaacttcctttgaaaaactgctttgaattatgatctctgattcattgtccattttactaccaaatattaactaaggccttattaatttttatataaattatatcttgtcctattaaatctagttacaatttatttcatgcataagagctaatgttattttgcaaatgccatatattcaaaaaagctcaaagataattttctttactattatgttcaaataatattcaatatgcatattatctttaaaaagttaaatgtttttttaatcttcaagaaatcatgctacacttaacttctcctagaagctaatctataccataatattttcatattcacaagatattaaattaccaattttcaaattattgttagtaaagaacaaaatgattctctcccaaagaaagacacattttaaatactccttcactctaaaactctggtattataacttttgaaagttaatatttctacatgaaatgtttagctcttacactctatccttcctagaaaatggtaattgagattactcagatattaattaaatacaatatcatatatatattcacagagtataaacctaaataatgatctattagattcaaatatttgaaataaaaacttgatttttttgt

SEQ ID NO: 636 - DNA, 1404 bp, Homo sapiens
tctagaactagtggatccgccatgaaggaggtgtgttacgaaagactcggctgcttcagtgatgactccccatggtcaggaattacggaaagacccctccatatattgccttggtctccaaaagatgtcaacacccgcttcctcctatatactaatgagaacccaaacaactttcaagaagttgccgcagattcatcaagcatcagtggctccaatttcaaaacaaatagaaaaactcgctttattattcatggattcatagacaagggagaagaaaactggctggccaatgtgtgcaagaatctgttcaaggtggaaagtgtgaactgtatctgtgtggactggaaaggtggctcccgaactggatacacacaagcctcgcagaacatcaggatcgtgggagcagaagtggcatattttgttgaatttcttcagtcggcgttcggttactcaccttccaacgtgcatgtcattggccacagcctgggtgcccacgctgctggggaggctggaaggagaaccaatgggaccattggacgcatcacagggttggacccagcagaaccttgctttcagggcacacctgaattagtccgattggaccccagcgatgccaaatttgtggatgtaattcacacggatggtgcccccatagtccccaatttggggtttggaatgagccaagtcgtgggccacctagatttctttccaaatggaggagtggaaatgcctggatgtaaaaagaacattctctctcagattgtggacatagacggaatctgggaagggactcgagactttgcggcctgtaatcacttaagaagctacaaatattacactgatagcatcgtcaaccctgatggctttgctggattcccctgtgcctcttacaacgtcttcactgcaaacaagtgtttcccttgtccaagtggaggctgcccacagatgggtcactatgctgatagatatcctgggaaaacaaatgatgtgggccagaaattttatctagacactggtgatgccagtaattttgcacgttggaggtataaggtatctgtcacactgtctggaaaaaaggttacaggacacatactagtttctttgttcggaaataaaggaaactctaagcagtatgaaattttcaagggcactctcaaaccagatagtactcattccaatgaatttgactcagatgtggatgttggggacttgcagatggttaaatttatttggtataacaatgtgatcaacccaactttacctagagtgggagcatccaagattatagtggagacaaatgttggaaaacagttcaacttctgtagtccagaaaccgtcagggaggaagttctgctcacgctgacaccctgctgaggatcccccgggctgcaggaattcgatatc

SEQ ID NO: 637 - DNA, 1324 bp, Homo sapiens
ctactactactaggccacgcgtcgactagtacggggggggggggaaagcgcgcgagcaagatggccaccaccaagcgcgtcttgtacgtgggtggactggcagaggaagtggacgacaaagttcttcatgctgcgttcattccttttggagacatcacagatattcagattcctctggattatgaaacagaaaagcaccgaggatttgcttttgttgaatttgagttggcagaggatgctgcagcagctatcgacaacatgaatgaatctgagctttttggacgtacaattcgtgtcaatttggccaaaccaatgagaattaaggaaggctcttccaggccagtttggtcagatgatgactggttgaagaagttttctgggaagacgcttgaagagaataaagaggaagaagggtcagagcctcccaaagcagagacccaggagggagagcccattgctaaaaaggcccgctcaaatcctcaggtgtacatggacatcaagattgggaacaagccggctggccgcatccagatgctcctgcgttctgatgtcgtgcccatgacagcagagaatttccgctgcctgtgcactcatgaaaagggctttggctttaagggaagcagcttccaccgcatcatcccccagttcatgtgccagggcggtgatttcacaaaccacaatggcactgggggcaagtccatctatgggaagaagttcgatgatgaaaactttatcctcaagcatacgggaccaggtctactatccatggccaactctggcccaaacaccaatggctctcagttcttcctgacatgtgacaagacagactggctggatggcaagcatgtggtgtttggagaggtcaccgaaggcctagatgtcttgcggcaaattgaggcccagggcagcaaggacgggaatccaaagcagaaggtgatcatcgccgactgtggggagtacgtgtgaggcggcactctctatgattccccctccgctcttgaccctgcatatccaggaaggaactgccagcctcagaggaggcacaccgagggtgcctgtttgaagcaagcagcatttgggatatgtgcccttcctcagggtctgcttggagcagctcctctgcagcacagcctggactattcccaggcacagctgtgggcccaggagccagctcaggtgctcccctccaccatgggcaggctgtgcaaaaagccactggtttttctcagcatttgctgctgggcctctcctgggactaccagtgtggctcttacgtgttttctttgctaaaataaaccctagtcttaaaaaaaaaaaaaaaaaa

SEQ ID NO: 638 - DNA, 3481 bp, Homo sapiens
aagtaacgccgcggaccgggaaagtgggaggggccgctcccggaacgcagccttcttgtaagaacctccaaggaagcaagaagaaaaaagaggcgctaccctgcgctcccgggaggcctctgaaagcttccactagagaaaaactccccactcttacaatttctttaaccgcaagaagcggaggacctggacaaggactcgaggagcaaggtggcgaaccaagggtagggcgcaccgggcccgagaggtcccccgcaggttgcagatacggtggactctctgcggcttctgagcacggagggagctgtcgcggggtcgggaggtcgtctctcatccctgcctcatcttccgacggccggcggggccatgtccagaggcccgagctccgcggtcctgcctagcgccctgggatcccggaagctcggcccccggagcctcagctgcctgtcggacctggacggcggcgtggccctggagccgcgggcctgtaggccccctgggagcccgggccgcgcgccgccgccaacgccagcgccgtcgggctgcgacccccgcctgcggcccatcatcctgcggcgggcgcgctcactgcccagctcccccgagcgccgccagaaggccgcgggcgcgccgggcgctgcgtgtcggccgggctgcagccagaagctccgcgtgcgcttcgccgacgccctgggcttggagctggcacaggtcaaggtgttcaacgcgggagacgacccgtccgtgccgctgcacgtgctgtcgcggctcgcaatcaactcggacctgtgctgcagcagccaggacctggagttcaccctgcattgcctggtgcccgatttcccgccgcccgtcgaggccgccgactttggcgagcgcctgcagcggcagctcgtgtgcctggagcgtgtcacttgctcggaccttggcatcagcggtacggtgcgcgtgtgcaacgtggccttcgagaagcaggtggctgtgcgctacactttctcgggctggcgcagtacccacgaggcggtggcgcggtggcgcgggcccgcaggccccgaaggcacggaggacgttttcaccttcggctttccagtaccgcccttcctgctggagctcggctcccgcgtgcacttcgcggtgcgctaccaagtggcgggtgccgagtactgggacaacaacgaccacagagactacagcatcacatgtcgcaaccacgcgctgcacatgcctcgcggggagtgcgaagagagctggatccacttcatctgagccgcgcggggaccagccacctggagcctccacacctaagctgcgcctcctgtcatttccctgctgggctctcacatctatctggttgttcttcaccaccctccaagtcctctgacctaattttctgctgcaaggtcccctggcagtggcccatcctgtcttctacttgaaacgtctgagtcacttggtctaaaaagtagcctcaggtggccagaaggccgagttgtgtaatgagttggggcagggtggtggggtaggtgcatgggagggtgggccctctggggaggcccaagcagcttgttttgcaaaggcccaagtcctcctgctaggaaaagcttttgcatgtgtcctgaatgtgtctctgtaaacatagctgttatttattattgtgatgttggggacctttagcccatagcggatgcctcctcaggaatattctcgatttaataagctaaaaaaaaaaagttctgtgtttgtgcccacagtaaacagaatgtacagtgtgacccacatcgtgtacctccaggcattcctgccccaggataaggaaaacctgagcccacatctgattgccaacggctgtagccttctaacagtgggaaactattaataggcaagaaatttctgctttatcagtcatcacacaaccattcctgggcattgagactgtcctggttaggctgtgtgtctcctacattaacagctggggaggagggaagagcttcagacttttaaactagcaaaacagttatttctctgcattcacaattctgatttcatgtatttctctgtacatgtttgatcattatcaggccattctgtttaagtttgaaactaagcattttaagaagtcttgcctcagttatttcagttttcaggtgactagagaatttcaggcaacagtgccctttgcaattacctttttgatgattaaggtgactatttttatttcttgttaagcatcagaagatgtcagcattcatcttttgggagtccagttacaaggtggaactagaaggtgttttcagcaatagccagagcactggaggaaaaataattgacaaatatttatacttttaaattgttttgaactgtatttacatacatcatgttttatcaggtacccaccaactttatactttctgccttcagatagagtttctaacattttctagtttgtcagttttaaaatataaaattcttttatgtttttaaacagtcaaccaagaagtcaggaccactgtcccctgctgagttaggcaatcacttaaaactccaaagaactccaggctgaggagttcttttggtgctgaacagtggtctgacaacaggtgctagaattaaggtgtgggaaaaaaaaaaaaacagccaggaaggacaagatctccaatttgtgaagcttatgatacagctgaaaccagtctgatcaattttatgctacctgtcaccaagaaattaactctaaatttttgaatgcttgttggcatctgtcaaatcaatactgaaaggatgcatttcggcttttaaccagtttggttctgatcattgcaacctctgtgcttttataattcaaagaacaaggatagctttcttcggtatcttttaatataagaacactgaattttggcttgaaatattgtgactaaattgcacaatctctggctattagcactgttcactacattaacatgcaagagagagagaagccttgttacatttcctgctatttaacaaactgtccaattaggtcagcaagcctgttagggccttcactgctacgcccctggccccaaaacagagagcaagacagttgtccagagaatttagatatgagttaagagctgccagatttattttaaggcatgtagagaatctcataatctatgtgaaagtcacttgccaaaaaggttttggttatgaaagtgaatgttatatatttaatattaagtgaacctcccgtgccttttaaaaaataccaacattatgaaatttaaaagcttaaatatatttgcctagttgataaagaggctgtggaacaactgaaggagaactttcagaccctaaaacagttatattacttagatgttaaaattttctagtgggctgtgcaattgctgggttgtccccccaaacatattttaatatgttatttaaaatgattttacccaagcctaagtattaaagtatatgtgcaaaaacaaaaaaaaaaaaaaaa

SEQ ID NO: 639 - DNA, 1723 bp, Homo sapiens
aagtcgggagaggccggtaggcgtgaggcgggcctgaagcggcagcgggctgccttcgtccggcgagagctaggccgaggacccgcgccgcgctccccggcacctcaccgcgtccttcaccgactcccgcggcgcgcggccgggctggggctcgggatccgcatcgggatcgggccgccatggacgacaaggcgttcaccaaggagctggaccagtgggtcgagcagctgaacgagtgtaagcagctgaacgagaaccaagtgcggacgctgtgcgagaaggcaaaggaaattttaacaaaagaatcaaatgtgcaagaggttcgttgccctgttactgtctgtggagatgtgcatggtcaatttcatgatcttatggaactctttagaattggtggaaaatcaccggatacaaactacttattcatgggtgactatgtagacagaggatattattcagtggagactgtgactcttcttgtagcattaaaggtgcgttatccagaacgcattacaatattgagaggaaatcacgaaagccgacaaattacccaagtatatggcttttatgatgaatgtctgcgaaagtatgggaatgccaacgtttggaaatattttacagatctctttgattatcttccacttacagctttagtagatggacagatattctgcccccatggtggcctctctccatccatagacacactggatcatataagagccctggatcgtttacaggaagttccacatgagggcccaatgtgtgatctgttatggtcagatccagatgatcgtggtggatggggtatttcaccacgtggtgctggctacacatttggacaagacatttctgaaacctttaaccatgccaatggtctcacactggtttctcgtgcccaccagcttgtaatggagggatacaattggtgtcatgatcggaatgtggttaccattttcagtgcacccaattactgttatcgttgtgggaaccaggctgctatcatggaattagatgacactttaaaatattccttccttcaatttgacccagcgcctcgtcgtggtgagcctcatgttacacggcgcaccccagactacttcctataaatttctcctgggaaacctgcctttgtatgtggaagtatacctggctttttaaaatatatgtatttaaaaacaaaaagcaacagtaatctatgtgtttctgtaacaaattgggatctgtcttggcattaaaccacatcatggaccaaatgtgccatactaatgatgagcatttagcacaatttgagactgaaatttagtacactatgttctaggtcagtctaacagtttgcctgctgtatttatagtaaccattttcctttggactgttcaagcaaaaaaggtaactaactgcttcatctccttttgcgcttatttggaaattttagttatagtgtttaactggcatggattaatagagttggagttttatttttaagaaaaattcacaagctaacttccactaatccattatcctttattttattgaaatgtataattaacttaactgaagaaaaggttcttcttgggagtatgttgtcataacatttaaagagatttcccttcatttaaactaaattactgttttatgttgatctgcatatttctgtatatttgtcatgacagtgcttgcatcctatttggtgtactcagcaaataaacttttcattttaaac

SEQ ID NO: 640 - DNA, 1306 bp, Homo sapiens
cactcagcggctctcgggtcccagcgtcccagccgcggcccgcgctcctccgccccgctcctcctcctcctcttcctcctcctcctcctctctaggcacccccgtcccctccttccagcggctgcagcccccagccccaactctccgcgcttactcctgggacgcgcgtcctcgccccatcctttgcttccttccttccttccttcttccttcctcccctggctcccgccctccctctccaggtcgccctcccggggcccgattgtctcggtgccccgctcccggcccgcgccctgccccgtctctcccttgcacttcctgagtcgcccgccgccgccgtcgcagactcgccgcgggagccccagcccaacccgagcccgacagccactgccccggctccagctccagccccacagcccgcggcgcccgcccgagggagccccggcgcccggggaaggctccagtgggctagcgcgccctcgcccagccccgcgccccagccctgcccggcccggcgaggaaggaccgggaagatgaacaacggcggcaaagccgagaaggagaacaccccgagcgaggccaaccttcaggaggaggaggtccggaccctatttgtcagtggccttcctctggatatcaaacctcgggagctctatctgcttttcagaccatttaagggctatgagggttctcttataaagctcacatctaaacagcctgtaggttttgtcagttttgacagtcgctcagaagcagaggctgcaaagaatgctttgaatggcatccgcttcgatcctgaaattccgcaaacactacgactagagtttgctaaggcaaacacgaagatggccaagaacaaactcgtagggactccaaaccccagtactcctctgcccaacactgtacctcagttcattgccagagagccatatgagctcacagtgcctgcactttaccccagtagccctgaagtgtgggccccgtaccctctgtacccagcggagttagcgcctgctctacctcctcctgctttcacctatcccgcttcactgcatgcccagtgtttctctcctgaggcaaagcccaacacacctgtcttttgtccacttctccagcaaattagatttgtctctgggaatgtgtttgtaacataccaacctactgcagaccagcagagggagctcccatgttgaatttgtttgttagctattttcccccctttcacaaaaactatttcttgacgacctttgagagatttcaataaaaattttaatcagagcaaaaaaaaaaaaaaaaaaaaaaaaaa

SEQ ID NO: 641 - DNA, 1020 bp, Homo sapiens
cggccgccggctcccgcggtcccaccgtgagctcgccggcccgtcgcccgctcgccatgcaaccgccgccggcctcgcgcgcgtaggcgcccgccgcaggccatgctgcccctgctcgccgcgctcctggccgccgcctgcccgctgccgcccgtccgcggcggggccgcggacgcgcccggcctcctcggggtgccctccaatgcttcagtcaacgcgtcctccgcggacgagcccatcgccccgcggctgctggcctcggcggcccccgggccccccgagcgcccgggcccggaggagacggcggcggcagcggcgccgtgcaacatcagcgtgcagcggcagatgctgagctcgctgctcgtgcgctggggccgcccgcggggcttccagtgcgacctactgctcttctccaccaacgcgcacggccgcgctttcttcgccgccgccttccaccgcgtcgggccgccgctgctcatcgagcacctggggctggcggcgggcggcgcgcagcaggacctgcgcctctgcgtgggctgcggctgggtgcgcggtcgccgcactggccgcctccggcccgccgccgcccccagcgccgccgccgccaccgccggggcgcccaccgcgctgccagcctaccccgcggccgagccgcccgggccgctgtggctgcagggcgagccgctgcatttctgctgcctagacttcagcctggaggagctgcagggcgagccgggctggcggctgaaccgtaagcccattgagtccacgctggtggcctgcttcatgaccctggtcatcgtggtgtggagcgtggccgccctcatctggccggtgcccatcatcgccggcttcctgcccaacggcatggaacagcgccggaccaccgccagcaccaccgcagccacccccgccgcagtgcccgcagggaccaccgcagccgccgccgccgccgccgctgccgccgccgccgcggccgtcacttcgggggtggcgaccaagtgacccgctccgctcctc

SEQ ID NO: 642 - DNA, 2140 bp, Homo sapiens
gactgggatcccggccgcggctgctggaagcgtcgaagctcagcggggccgcggacactgacctgtgcttagaactcatcctggcccgcagagcctgccgcgagtccctggcgtcccctgtggcgggctcttggagccactttcccgagcggaagtcagcccgcggctcggactccggcgggacctgctcggaggaatggcgccgccgggttcaagcactgtcttcctgttggccctgacaatcatagccagcacctgggctctgacgcccactcactacctcaccaagcatgacgtggagagactaaaagcctcgctggatcgccctttcacaaatttggaatctgccttctactccatcgtgggactcagcagccttggtgctcaggtgccagatgcaaagatctctatttcaaatgagaccaaagatctgcttctggcagctgtcagtgaggactcatctgttacccagatctaccatgcagttgcagctctaagtggctttggccttcccttggcatcccaagaagcactcagtgcccttactgctcgtctcagcaaggaggagactgtgctggcaacagtccaggctctgcagacagcatcccacctgtcccagcaggctgacctgaggagcatcgtggaggagattgaggaccttgttgctcgcctggatgaactcgggggcgtgtatctccagtttgaagaaggactggaaacaacagcgttatttgtggctgccacctacaagctcatggatcatgtggggactgagccatccattaaggaggatcaggtcatccagctgatgaacgcgatcttcagcaagaagaactttgagtccctctccgaagccttcagcgtggcctctgcagctgctgtgctctcgcataatcgctaccacgtgccagttgtggttgtgcctgagggctctgcttccgacactcatgaacaggctatcttgcggttgcaagtcaccaatgttctgtctcagcctctgactcaggccactgttaaactagaacatgctaaatctgttgcttccagagccactgtcctccagaagacatccttcacccctgtaggggatgtttttgaactaaatttcatgaacgtcaaattttccagtggttattatgacttccttgtcgaagttgaaggtgacaaccggtatattgcaaataccgtagagctcagagtcaagatctccactgaagttggcatcacaaatgttgatctttccaccgtggataaggatcagagcattgcacccaaaactacccgggtgacatacccagccaaagccaagggcacattcatcgcagacagccaccagaacttcgccttgttcttccagctggtagatgtgaacactggtgctgaactcactcctcaccagacatttgtccgactccataaccagaagactggccaggaagtggtgtttgttgccgagccagacaacaagaacgtgtacaagtttgaactggatacctctgaaagaaagattgaatttgactctgcctctggcacctacactctctacttaatcattggagatgccactttgaagaacccaatcctctggaatgtggctgatgtggtcatcaagttccctgaggaagaagctccctcgactgtcttgtcccagaaccttttcactccaaaacaggaaattcagcacctgttccgcgagcctgagaagaggccccccaccgtggtgtccaatacattcactgccctgatcctctcgccgttgcttctgctcttcgctctgtggatccggattggtgccaatgtctccaacttcacttttgctcctagcacgattatatttcacctgggacatgctgctatgctgggactcatgtatgtctactggactcagctcaacatgttccagaccttgaagtacctggccatcttgggcagtgtgacgtttctggctggcaatcggatgctggcccagcaggcagtcaagaggatcgctgcagagcagagcagtagattggcaaaatataggacactacgaacagcacattagttccagaagaaagatggaaattctgaaaactgaatgtcaagaaaaggagtcaagaacaattcacagtatgagaagaaaaatggaaaaaaaaacttt

SEQ ID NO: 643 - DNA, 1912 bp, Homo sapiens
attgagagaacagagaacatgacaagtacttctagctcagcactgctccaactactgaagctgattttcaaggctacttaaaaaaatctgcagcgtacattaatggatttctgttgtgtttaaattctccacagattgtattgtaaatattttatgaagtagagcatatgtatatatttatatatacgtgcacatacattagtagcactacctttggaagtctcagctcttgcttttcgggactgaagccagttttgcatgataaaagtggccttgttacgggagataattgtgttctgttgggactttagacaaaactcacctgcaaaaaactgacaggcattaactactggaacttccaaataatgtgtttgctgatcgttttactcttcgcataaatattttaggaagtgtatgagaattttgccttcaggaacttttctaacagccaaagacagaacttaacctctgcaagcaagattcgtggaagatagtctccactttttaatgcactaagcaatcggttgctaggagcccatcctgggtcagaggccgatccgcagaaccagaacgttttcccctcctggactgttagtaacttagtctccctcctcccctaaccacccccgcccccccccaccccccgcagtaataaaggcccctgaacgtgtatgttggtctcccgggagctgcttgctgaagatccgcgcccctgtcgccgtctggtaggagctgtttgcagggtcctaactcaatcggcttgttgtgatgcgtatccccgtagatgccagcacgagccgccgcttcacgccgccttccaccgcgctgagcccaggcaagatgagcgaggcgttgccgctgggcgccccggacgccggcgctgccctggccggcaagctgaggagcggcgaccgcagcatggtggaggtgctggccgaccacccgggcgagctggtgcgcaccgacagccccaacttcctctgctccgtgctgcctacgcactggcgctgcaacaagaccctgcccatcgctttcaaggtggtggccctaggggatgttccagatggcactctggtcactgtgatggctggcaatgatgaaaactactcggctgagctgagaaatgctaccgcagccatgaagaaccaggttgcaagatttaatgacctcaggtttgtcggtcgaagtggaagagggaaaagcttcactctgaccatcactgtcttcacaaacccaccgcaagtcgccacctaccacagagccatcaaaatcacagtggatgggccccgagaacctcgaagacatcggcagaaactagatgatcagaccaagcccgggagcttgtccttttccgagcggctcagtgaactggagcagctgcggcgcacagccatgagggtcagcccacaccacccagcccccacgcccaaccctcgtgcctccctgaaccactccactgcctttaaccctcagcctcagagtcagatgcaggaggaagacacagcaccctggagatgttaaggcagaagtcagttcttctgtccatccctctccccagccaggatagagctatcttttccatctcatcctcagaagagactcagaagaaagatgacagccctcagaatgcacgttatgaggaaggcagaatgtgggtctgtaattcctccgtgtcccttctccccctctgcaaaccgtcgtaacaataatagttcctaacacatgggacaattgtgaggattaaatgagttagcctgcagaaatcacttgatgcacagcacatgggaagcattgtgtgtatttattaatccttcacaaagtctttgagatatatttttatcaaatatttagcatggatcccggtacactttcaatacttaataaatggtcaatgttattctttttcactatt

SEQ ID NO: 644 - DNA, 749 bp, Homo sapiens
ctcccctcaccccggtccaggatgcccagtccccacgacacctcccacttcccactgtggcctgggtgggctcaggggctgcccttgacctggcctagagccctcccccagctggtggtggagctggcactctctgggagggagggggctgggagggaatgagtgggaatggcaagaggccagggtttggtgggatcaggttgaggcaggtttggtttccttaaaatgccaagttgggggccagtggggcccacatataaatcctcaccctgggagcctggctgccttgctctccttcctgggtctgtctctgccacctggtctgccacagatccatgatgtgcagttctctggagcaggcgctggctgtgctggtcactaccttccacaagtactcctgccaagagggcgacaagttcaagctgagtaagggggaaatgaaggaacttctgcacaaggagctgcccagctttgtgggggagaaagtggatgaggaggggctgaagaagctgatgggcagcctggatgagaacagtgaccagcaggtggacttccaggagtatgctgttttcctggcactcatcactgtcatgtgcaatgacttcttccagggctgcccagaccgaccctgaagcagaactcttgacttcctgccatggatcttttgggcccaggactgttgatgcctttgagttttgtattcaataaactttttttgtctgttgaaaaaaaaaaaaaaaaaaaaaaaa

SEQ ID NO: 645 - DNA, 1220 bp, Homo sapiens
agagctgctcagcacgccctgggatcgcgggcggttttcatcggccggtttgtgaaacggacaagagagagacattactgccgggagtgttgagtgaagggaccaggtggagatgatgcctcaggagcagtacactcaccaccggagcaccatgcctggctctgtggggccacaggtatacaaggtggggatttacggctggcggaaacgatgcctgtatttctttgtcctgctcctcatgattttaatactggtgaacttggccatgaccatctggattctcaaagtcatgaacttcacaattgatggaatgggaaacctgaggatcacagaaaaaggtctaaagctagaaggagactctgaattcttacaacctctctacgccaaagaaatccagtcccgaccaggtaatgccctgtacttcaagtctgccagaaatgttacagtgaacattctcaatgaccagactaaagtgctaactcagcttataacaggtccaaaagccgtagaagcttatggtaaaaaatttgaggtaaaaactgtttctggaaaattgctcttctctgcagacaataatgaagtggtagtaggagctgaaagattacgagttttaggagcggagggcacagtgttccctaaatctatagaaacacctaatgtcagggcagaccccttcaaagaactaaggttggagtccccaacccggtctctagtgatggaggccccaaaaggagtggaaatcaatgcagaagctggcaatatggaagccacctgcaggacagagctgagactggaatccaaagatggagagattaagttagatgctgcgaaaatcaggctacctagactgcctcatggatcctacacgcctacaggaacgaggcagaaggtcttcgagatctgcgtctgcgccaatgggagattattcctgtctcaggcaggagctgggtccacttgtcagataaacacaagtgtctgcctctgaaagactatccatagtggacattgttggcagcataaaggccttttttggctttagacactggctgccagctatttttactagaacacagaaagcctatcaaagaccttgtgtgtatgtgtacgtgtgtgtgcgtgcttgagtgtgttcgcgtgtgtgggtggatataaatatatataaatatatataaataaatatatatatcctctgtatcaaaaaaaaaaaaaaaaaaaaaaaa

SEQ ID NO: 646 - DNA, 128117 bp, Homo sapiens
gatcacttgaggtcaggagttcaagaccagcctggtcaacataatgaaaccccgtctctactaaaacacacacaaaaaaattagctgggcatcatggcaggtgcctgtagtcccagctactcaggaggctgaggcgggaggatcgcttgaacctaggaggtggaggttgcagtgagttgagattgtgccactgcactccagcctcggtgacagagcgaaacttcatctcaaaaaaaaaaaaaaaaaaaaaaaaaaaaagccttcaaatgcattccgagccatcatggctttcaaaagcattctggagagctaaacttcactgtgctcacaaaatgtgatttgcatctaaatatggatgacagaaaggaagaaagagagccagtagaggctgtggccagttcctcctctccaaaggacggatgccatttagaaatgtaggcccagttttcaaaggagtctaaaatccagatttttatgtaaaatctcccagtttttcactgctggcaaatgaaaattgttaagtactggctgggctaaacaaaacacacattcgtatgacctctgctctattcaagcctccaagttcatcaaactaatcttcttagccccttctcccaagccctgaagactaagtgcatttcacattccagtcaccaggcctttgttcatgaggttacctctgtcttggaacatctgcccaattttcttaaaggctcaactgaggtttgtctcagtgatggctgtcttttctgacctactgtagcacatacctgttgtttaagaaatgagttggcttttcccatccccaaaacagctgtcctatcttgatggatcaaggtagatgttttgcctttgtagaaccacaatggaggtgctccagcccacttcagaggggattctggggcaagagaagctgagttaactaacaatctactcagttaataactgcagatgccgtattttcactgtcccccacccaacccccaagggcatagttattttgttctaagagctttgtgggtgaataccacccaccccctttttatttttgagacaagagtctcgctctgtcacccaggctggagtgcagtggtgcaatctcggctcactgcaacctccgcctcctgggttcaagtgattctcctgcctcagcctcccgagtagctgggactacaggcatgcactaccacacccagctaattttgtatttttagtagagatggggtttcaccatgttgcccaggctggtctcgaactcctgacctctggtgatccacccgcctcagcctcccaaactgctgggattacaggcatgagccaccgtgcccggccaaataaccccttttaaatgatgctgttagcctatacgtgccctctgatccagccagtttcttttccatggcatttctgtccatgccctacctcttcccatcttaacactattgccctgctgttccctcactatcaaagccgcctcctgaagtcttctcccatctccccaagcagtagtctcccgctcctgaatggctcactcttgctagagctgtcttatggcccatgccacatgcttccttttgttataatcttttgtgtcccttatttcctctagattgcaaactctttgcctgtgggaagtatgtcttacacatttgtatatcctcacaacacacagcctcatgtagcagacatctaatacttgtttaaaaatgaagtttagggacagcttaggagatctcgctgtctgctaggtgagtcccaagtccgtgtggttgtacctacccaagatgaaggtaagaacacccaagcctgcctcctgctcaacctgctgccctaagaaaacctctgcatgtcccctgtctaaaactgtctatgcacttcgctctgagaatgcactgtcttccatctcctaccctagcaatcaggttctatgcatctcagtgcaaacagccgttaacgtttcaggatagacaaatatgctaaaaggacaaaaggaaaaattcttgacaccattttgatttacacctcctcttcattccagcctcctggcgctttgtatggtggctggaagtgcttgacaaatcatagcaccatcaaatttatacagtcgtccctaggtgtctgcaggccattggttgcagaatccctctctgataccaaaatccactcatttctcagccctgaagtcggccctgtgaaacctgtggacacaaaaagttggccctccttatacacaagtcccgcatcccaaatttgattgtggatgcagaacccacagaaacagagggccgactgtatttattgaaaaaaatccacatataagtgaaccagcacaactcaaatccatgttgttcaaaggtcaactgtaggccgggcgcagtggcccacgcctgtaatcaccacactttgggaggctgaggcaggccgatcaacggaggtcaggagtttgagaccagcctggccaacatggtgaaaccccgcctctactaaaaatacaaaattatcctggcatggtggcacacgcctgtaatcccagctactcaggaggctgagacaagagaatagcttgaacccaggaggtggaggttgcagtgagctgagattgcaccactgcactccagactgggcaacagagcaagactctgtctcaaaaaaaaaaaaaagaaaagaaagaaaaggaaaaaaaagaaaaacaaaagttggttgctttctgtaaatgtgaccagatttgaatgaatgcatgtaaatctatgctgtactttgctggggaggtttttgtcagggataaggatgggggcaaactatgttaagggaagtgatgacaagaaagccttccctgcgattaagaaattataataatatatgcttaactggcaggggagataccatgatcacaaaggtggttttcccagggcgaggcttatccattgccctctggatgtgctgacccctgcgatttccccaaatgtgggaaactcgactgcacaatttgtggtagtgggggactgtgttcgcgctttcccttgagaaaaaaaaaaaagaaagaaattataggccgggcacggtggctcacgcctgtaatcctagcactttcggaggccgaggcaggcggatcacgaggtcaagtgatcgagaccatcctggctaacacggtgaaaccccgtctctactaaaacacaaaaaattagccgggcgtggtggtgggcgcctgtggtcccagctacttgggaggctgaggcaggagaatgccgcgaacctgggaggcagagtttgcagtgagcggagatcgcactactgcactccagcctgggcgacagagcaagactccgtctcaaaaaaaaaaaaaaagaaagaaattataataatataataataactaccacttattggtcacttaatgtatacaaggcagtttattatcccatttaactgtctttattgaccctatgaaataagtactcttagtactcctattttatagatgaggaaacaaggcacaaggtgtaagtcacttacccaaccatcacatagctagtaagtaagtggcgaagctgggacttgaacctatgtctctccttcctcaggccctttttttattcaccaagagtacaggagcctaatcctgtaggcaagggaactggatcattttgactttagttcccttgccccaggtgtgggactagaggatgagggagcgggaaagcaaaccttgatattgggagtccacagcctcagtgcaagagttgagaaaatcaatactttgcaagctcagaaactgagaggccatagccttgtcttaatccgttcaggctgcaataacaaaatatcataaactagatggcttataaacaaccaaaatgtatttctcaccgttctggagactgagaagtccaaggtcaaggcagatttgatacctggcgaaggccagcttcctagagccttcttgctttgccctcacatggtggaagggggagctagctttcttccatctcttttaaaaggacccgaatcccattcatgagagctttgccttcatggcctaatcacctcccaaaggccctgcctcctaaaaccatcaccctaggagtcaggatttcaacagatgaattttgggaggacacaaacactcagagcataacgagcctggctttggccagggaatggttaactcaagttagagagaggaaaaaaaaaaaatctttggaaaactgggctgtcctggggtctgctttagtccctggcagtctggcaatggaaagccctacttgttgctttgacttgagaagccgtaatgagcagtgagccacaggcatagaccattcagtagacacaggtctttggccagccttgaacgacaactgctcagagggactgggaagaaagcccgcctaccacagggggcagggctgggagcagaagcaaagccccaggatgggagagtaaattgttataactatccctgcgaggaggtgctaacaaagttccaggttttctgcctacttcaatatttcccggttggcatagcatctactcttagtaggaacagagttctatttgcctaacagagtcaaattacctgtccagaggtacaaacactgctaggttctaagccttcagggtagtggagaggagtggagccttacctttagtttgttgtattttcaactctctgctgtcatcttacttttaggtctggcccctttgtgaaccaaattcttctaactgagtagcattgcgttagcagtcagaaaaaaaaaaaaaaaagatgcttttcaaatataggtagatgtctggacatcccttaggcaaggtggctctgtatgagcgtcactattaaagtgaaaggaaaggaaaagtctccccacccttgtttttttttcaaaaggtatagagtgcccgaaatactttagggatggcagctgttgagcatggaaacaagacttgtccctagagggaaggcaaggaaggcatggggaagagccttcctaactccacttagtgtaaaatcactctgtcctcttcccctgacctgagctggcttattccttggaagagataaagatctgggagtcaaaatgaccaccctgtgctgagcaggcttctttgaactccagctaaacggtaacagcacctaagataggatgttcccaccctcactccccacctcaaagtggaggtgaagagggagataagggaaagggagagaaaggtcccaggaaaggtctgctgtcaagagggaggacccgcagctggctgggagcattcacaggaagtaccaattttcacctccttttttccacagagctgttgcttatttgcctacgacggctgtgttcctcttgaggctgtaatgggcagactagctcagtgggtaacagtgtgagctttggatcccagccttgccacttactcccgcgtgaacttgtgtacaccacataacccatctgagcctcatcttcctcatctgttttgagggtaagaatggtgcctacctcatctacttgcagcaaagactaaattcgtttagtgcaaatgcagagccaggcccataataagtactgtcaataatgctaagatgccatgtttattgttcttgaagcatcacttcagaatctgtgcacagcatggaaggcctgattagaaccataaaaaccagtccaaggccgggcgcggcgactcacgcctgtaatcccagcactttgggaggccgaggtgggtggatcacttgaggccaggagttccagaccagcctggccaacacgacgaaaccccgtctctaataaaaattaaaaaattagctgggcatggtggcgcgcgcccgtagtcccagctactcaataggctgaggcatgataatcacttgaaccaaggaggcagaggttacagtgagccgagattgcaccactccagcctgggcgacagagtgaaactctatttaaaaaaaaaaaaaagccagtccagatgtgtttccatgtttcctatgattactataaacacacaaatgagctgggctcacagaacctcaatagaccttggatatgtatagctaatgatgagcagcgacaggaatcgagagttcgtacagaattttttggtttggttagcgtaacaacaggctttacagacaggctccatgtgcaagcactgcacacctctgtatgttctcagccttctgagaactgtcactgccaaatcttttccttcaccctccccaccctatctcacccccaggcaaggtgacactttcaaagttggcacggcaggcagcacatgccaggcctgtgacccaggcctcagcagctctgctcacttgcatggcaattgctttctacagtcaggcccagctgcactttgggtctccccaacccccacccccaatcaccacacaggaactggctgtttctcttttcttcgtccaagctgaatactaacctactgtggtttgcttgcttcccccattgtgatcgcaggctttctgagcagctagtcaaccctctagcctgccactgaatcggaaggcattcacactggaggggatcaaggggagcttgtaggcttgccttgctggcgggcagctgcctacacccactcgtaccaatgtccccgctgcagagcccgggtgcttcccagctgtacaaggacaactatttgggtcccggctatgccaagagaaacatgggtcatgtggttcacaggacagaaaggttcatttactccaatatgactggcatttttttttgtttgattattggatatttgccaaaagactgaagcctcctgccacaaccacctcccccacatatatgtcctcagatggtttgggaattggacagcttagtcatcaggtcctgtcctccacatccacagaagatacaagttgtttccagataacatgcagaaggttctgagctccttcctgtgtgctccagctcgaagactcttttcttttccctatgaattttttttccttttctttctctggtctttcctttttaatgcccttttaaaattaagtattctatcttttgagtgggtaacacatacacatgatacaaaatccaaaaggtgcaacgagtatatgctgaaaagtaaacctctctaacctttgtccttagccattcagctctcctgtgagtcagtactgttgttagcagtttacctgtatctttccaaagatggtctatgcaaagatccacataaacttgtacatttatgttctgtttttaggtcagcagcagcacactacatacactcttctgtgccctgttttttttccacctgaaaatgtatctcggctgggcacggtggctcacgcctgcaatcccagcactttgggaggccgaggcaggtggatcacttgaggtcaggagttcaagaccagtctggccaacatggtgaaaccctgtctctactaaaaatatgaaaattagctgagcgtggtggtgggcacctgtaattctagctactcaggaggctgaggcggaggaatcacttgaacctgggaggcagaggttgcagtgagccgagatcacaccattgcactccagcctgggtgataagagtgaaactgtctcaaaaaaaaaaatgtatcttggaaatgataccacatcaatccagataaagctgccacatatttttcatttatgacatagtattcaacggtatgatatactatttatttaactagtccctgattggtggacatttagattatttccagtcttctgctagtactaacaatgctgtaacaaatctccttgttacatacatttttcacgcacatgcaaatagatctgtaggataaaaaggggtccccaacccctggtccgtggcctgttaggaacctggctgggccacacagcgtgaagtgagtggccagcgagtgagcattatggcctgagccccgcctcctgtcagatcagcggcggcattagattctcatagcagtgcaaaccctattgtgagctgtgcgtgcaagggacctgggttgcacactccttatgagaatctaatgcctgatgatctgagatggaacagtttcatcccaaaaccattccccccaaccccttgtccgtggaaaaatggtcctcggcaaaaccagtccctggtgccaaaaaggttagggactgctgggctaaattcctagaatttttgctttggtcaaagggcatatgtgtcttacatcttttttttttttttttgagatggagtcgccaggctgaagtgcagtggcgcaatttcagctcactgcaacctccacctcctaggttcaagcgattctcctgcctcaccctcccgagtagctgggagtacaggcacacgccaccatgcccagctaatttttgtattttcagtagagacagggtttcaccatgttggccaggatggtctccatctcctgacctcatgatccgcctgcctcggcctcccaaagtgctgggattacaggcgtgagctgccgtgcccagctgtgttttacatctttataaatattgttcagttatttcagtactcatggaaagactgaacaaccaaaacgttgcctctgttggaagacctctgaggaatttatcacaggaataatcaagtgctttgcttttaagtctttgttctttatttgtatctactgcaagtttgttatttctttccttcaatatgtattaaacacctcgacctctaccatgcaccaggtaagctttgaggccaaaaccataaacacaacaaatgtggttgctgcccccacagtatttacagtctaggagatggagcagttgggggcaggagtacacatgaacgaaataattatacactgagtcattacaaactgtgttaagtgccatgaaggagaagcacagggtgactgaaagtgttcagtaggctcctgacttcgtgtggaggtctcagaagatttccctggggaaatgatgtttattctgatcaataagacagacttagtgaggccgaggaaatggcaggtttgaagtcctagaggaaggcaggagcaaggattctggccagcagcatggattacaggatctggaaagggtcttcaaggacattttgtttcagtctcctcatttgacatgtgagaaaactaaagtttagggagctaaatgacttgaccagggttatacagatagtaacaaagtcaggctgcagaatccagtgtgctcatcctgggagctgtgggtctgaactagacagctatgggatagttgcctgggtttgtgtagaaggacttaagttcaggttcttgtgacaagctgcgtgacatgtttcatttctctttactagtaagatacagtttggatgaatggccattccaatctagcgggttggtttgttcttcagcatacttgtctttcttacaagtttaaataataataacaatggtggttaattctttagcgcttgctctatgtcaaatacagttctaagcaacttacatgtattaaatcatttcattttgacagcagttcttaaagttggtgttattattattaccccattttacagatgaggaaattgaagctccagaaggtaaaggcacttgccaaccatcacagagctagtgagtggcaaagcagggggaccgagtccaaacagtctggcttcagggcccatgtgctttgtctcccaggcactctcagtgtcagcagcaggctgatggactcaggtttgagcccagagctgccttgtgccatggaaggtccaatcagtggctctcaaccctggctgcacatcagaatcagctggggagcttgtaaaaagtgctaatgtccaggcctcgcccccgttcagttaaattgcaatctctaggggtggatcccagtcactgagggtttttaaaagcttccgtggtcagcctaatgcagctaacggttgagatgtactgggatctaggcttgccattgctttgccctttgggagcaaccagcaccccatacttgcctttgtgttctggacacccacttagtaggacacttgtagaggcacttattcataccacagcacaggctcctgtctcagcctaaagaactcattcagtgtacatgctttggcagccacatccaccagtgatgtgcggtaacaagtctgtaaagggctaagagaatattttcagtcctgagcgtcagaagacagtggagcttagtggagtggagcttggctctgagtcaaacagacccagattcaagttgatgctttgtgtcatggtctgtgattttagagactggcgtttatcctctcaccaactccattttgtcatccatataatcaagctaatacgataatactacctctttcatgaggcttttgtgaggattaaatgagatagtatatagaaagcaatcagtgggccaggcgcagtggctcatgcctgtaatcccagcactttgggaggccgaggtaggcagatcacctgtggtcaggagtccaagaccagcctggccaacatggtgaaaccccatctctactaagaaaaattagccaggcttggtggcagtcacctgtaatcccagctactcaagaggctgaggcaggagaatcgcttgaacctgggaggtggaggttgcagtaagccaagatcgtgccactgcacttcagcccggaagacagtgagactgtgtctccaacagaaaaaaaaaaaagaaaagaaaagaaagaggaaaaaaaagaaagaaagaagaaaaagaaagcactcagtgctaggccatgtctttatttcatgactatccacgtagcttatgtgagtaaacagctatatttgggaaaagctactagtgacactgatattgacaggaatttgatttgacatttaataagtgcctggtatgtacaatgaagagtgaaagatcctgaagagcttggatgactaggaaggccccgtgcctgctgactggcttgctggctgggagggagcataaagacacccagataactcatataaggtagagtgtgccgcagcagaggtctaaacgagaagctaagggaggccaggggcggtggctcatgcttgtaattccagcgctttgggaggctgaggcaggtggatcacttgaggttaggagttcgagaccagcctggccaacatggtgaaatcccatctctactaaaaatacaaaacagctggacatggtggcaggcacctatagtcccagctacttgggaggctgaggcaggagaatcacttgaacccgggaatggggaggttgtagtgagccgagatcgctccaaaaaaaaaaaaagctaagggagcacaagatatggagagagaaagccccaattcaaacagaagctggaaaacaattataaaataaccaaggaaatatgaatactaactgaactcaatatgtgatgatattaaggaattataaatttttaggtgtgataacggtattatacatatatttttgaggagcaattatagtttagataaacataattctaattaataatatgtaagtcagatgaattgaaatgatgtctcgtgggggtagagatgaaagaagattggccacgtatagctaattgttgaagttgggtgatggaactttgtgttcattttactggcctctctacttttatatatggttgagatttttcacaataaaaagttttaaaaagagggccgggcacagtggctcatgcctataatgccagcactttgggaggccaaggcaggcagatcacttgaggccaggatttcgagaccagcctggccaacatcgtgaaaccctgtctctactaaaaatacaaaaattagctgggcgtggtggcacacacctctaatcccagctacttggaggctggggcaggagaatcacttgaacctgggagacagaggttgcagtaagccaagatcgtgccactgcactccagcctcagtgacagagcgagattccataaaaaaaaaaaaaaaaaaaaactttttaaaagaggtaaagttgtggccaggtacagtggctcacgcctgtaatcccagcactttgggaggctgaggcaggtggatcacaaggtcaagagttcaaaaccagcctggccaagatggtgaatccccatctctactaaaaatacaaaaaaaatagccggttgtctgtaatcccagctactcgggaggctgaggcagagaattgtttgaacccgggaggcagaggttgcagtgagccgagattgcaccactgcactccagcctgggcaacagagcgaaactccgtctcaaaaaataaaaataaaagagagaggtaaagttgaagaaaaggaaggaaacaagcagtacacaattgtggaatctggaaaattttcaggatgaggtggcatctgacttgggcatgggtgactagggagagttgatgtcgcagtttaaatctgaagggagtctgctggcagaatctcctcttccttgaggggcttcagtcttttttcttttaaggccctcactgattggaggaggcccactcacattatggacaggaatttgttttactcaaagtctactgatttaaatgtcaaactcatcttaaacatgcctttacagcaacatctagactagtgtttttcccaaatagctgggtactgtggcctaaccaagttgacatatgaaattaatcatcacagggtggcagtgggaaatgatactaggaaaaccggtaggggccaaattgtaaagggttttgaattctgttaaaattgtctttagtaaacttctttggaaaatttttcttctcaaaatgttttcgttagaaaattgggaattgttgaaggcttctgagcaaagcaatggtaacatctgatgagtttggaagggtacttggctgcaatgtggaggatgagttggagagggcagagactgaaggtcaaatgatgggtaaggaaactgacccttgcttaagagagatgatgtgaggtactgggagtagagctgaaaagtatccaaagcatagaatataatgcaggtagcagcaagagatcaggctgagcagtaggcagaggccaggtcatggagcacctggtaagccagattaaagagcctggagtttatcctgatgataatgggggacccactgaagagttgaagtcaagggagtaacctgattaaatcgctctgactgctagatggggaataagggcaggtagaccagctagtaacagttgtagtagtgtgggcaaaagatgatggtggcttggactagggtgagagtggaaagaaagaaaagtaaacaaatttgggacatgtttggagccactggaacttggttagtgatggattagatcagagaaaggtgagagacagagaaaacttaaaggtgactcaggttttgggcctgagcaagtaggttgatgacagtgccatttgctgacatgaggaaaactagaggacagtcaggattggagtggagcaaaatcaagagttctgattaggacatataaagtttcagatgttcagtagacttctgagtagcaatgtcaagtagctagttgattacatgatcctgtggctcagaggagagatacagatagaaatttggaaatcatcaagcagaggagaacagaaagaaggccagtgcagttgaagggttttgtgaccctttatcttgggtcacaaaagagtgacccaagataaagttgaaaaggtgggagggtcaggcatggtggtgcatgcctgtggtcccagctactaggaaggctgaggaaggaggatcacttgagcccaagagttctggactgtagagcactaagctaatcagatgtccacattaagttcagcatcactatggtgacctctcgggagcgggggaccaccaggttgccaaaggaggggtgaaccggcccaggttggaaacagcagatcaaaactcctgtgctgatcagtagtgggattccacctgtgaatagcctgtgttgcccactccagcttgggcaacatagtgacaccacatctctgttaaaaaaaaaaaaaaattttgagacagagtccgctgcgacgtccaggttggagtggaatggcgtgatctcggctcacttcttcctgggttcaagccatctctgcttcctgggttcaagccattctcgtgcttcagcctcccgagtagctgggactacaggcatgcgccaccacgcctggctaatttttgtatttttagtagaaatggggtttcaccatattggccaggctggtctcaaactcccaacctcaagttatctgcccacctcggcctcccaaaatgctgggattacaggcgtgagccactgcacccaacttaaaaaatatttttttaaaaaaagaaaaaaatcggtgggcagagcagatcatataggaccttgtagcctacgagcatgctggaaccacttcctactggctcaggagaactgactgttaaatttcaggaaatttgggagctggtcgacttcgcatttggcagcctgaaatcagccatagtgggagtactgatgctgttgaaattggtaaatgctacaattcagcccttttttattttcccccagagaaccagttgttaaactttgccaccatattagtactatggcttgtaggctccagtaagaaatttagattttattcttttttttttttttttttttttttattatactctaagttttagggtacatgtgcacattgtgcaggttagttacatatgtatacatgtgccatgctggtgcgctgcacccactaatgtgtcatctagcattaggtatatctcccaatgctatccctcccccctcccccgaccccaccacagtccccagagtgtgatattccccttcctgtgtccatgtgatctcattgttcaattcccacctatgagtgagaatatgcggtgtttggttttttgttcttgcgatagtttactgagaatgatggtttccaatttcatccatgtccctacaaaggatatgaactcataattttttatggctgcatagtattccatggtgtatatgtgccacattttcttaatccagtctatcattgttggacatttgggttggttccaagtctttgctattgtgaatagtgccgcaataaacatacgtgtgcatgtgtctttatagcagcatgatttatactcatttgggtatatacccagtaatgggatggctaggtcaaatggtatttctagttctagatccctgaggaatcgccacactgacttccacaatggttgaactagtttacagtcccaccaacagtgtaaaagtgttcctatttctccacatcctctccagcacctgttgtttcctgactttttaatgattgccattctaactggtgtgagatgatatctcatagtggttttgatttgcatttctctgatggccagtgatgatgagcatttcttcatgtgttttttggctgcataaatgtcttcttttgagaagtgtctgttcatgtccttcgcccactttttgatggggttgtttgtttttttcttgtaaatttgtttgagttcattgtagattctggatattagccctttgtcagatgagtaggttgcgaaaattttctcccatgttgtaggttgcctgttcactctgatggtagtttcttttgctgtgcagaagctctttagtttaattagatcccatttgtcaattttgtcttttgttgccattgcttttggtgttttggacatgaagtccttgcccatgcctatgtcctgaatggtaatgcctaggttttcttctagggtttttatggttttaggtttaacgtttaaatctttaatccatcttgaattgatttttgtataaggtgtaaggaagggatccagtttcagctttctacatatggctagccagttttcccagcaccatttattaaatagggaatcctttccccattgcttgtttttctcaggtttgtcaaagatcagatagttgtagatatgcggcattatttctgagggctctgttctgttccattgatctatatctctgttttggtaccagtaccatgctgttttggttactgtagccttgtagtatagtttgaagtcaggtagtgtgatgcctccagctttgttcttttggcttaggattgacttggcaatgcgggctcttttttggttccatatgaactttaaagtagttttttccaattctgtgaagaaagtcattggtagcttgatggggatggcattgaatctgtaaattaccttgggcagtatggccattttcacgatattgattcttcctacccatgagcatggaatgttcttccatttgtctcctcttttatttccttgagcagtggtttgtagttctccttgaagaggtccttcacatcccttgtaagttggattcctaggtattttattctctttgaagcaattgtgaatgggagttcacccatgatttggctctctgtttgtctgttgttggtgtataagaatgcttgtgatttttgtacattgattttgtatcctgagactttgctgaagttgcttatcagcttaaggagattttgggctgagacgatggggttttctagataaacaatcatgtcgtctgcaaacagggacaatttgacttcctcttttcctaattgaataccctttatttccttctcctgcctgattgccctggccagaacttccaacactatgttgaataggagcggtgagagagggcatccctgtcttgtgccggttttcaaagggaatgcttccagtttttgcccattcagtatgatattggctgtgggtttgtcatagatagctcttattattttgaaatacgtcccatcaatacctaatttattgagagtttttagcatgaagggttgttgaattttgtcaaaggctttttctgcatctattgagataatcatgtggtttttgtctttggctctgtttatatgctggattacatttattgatttgcgtatattgaaccagccttgcatcccagggatgaagcccacttgatcatggtggataagctttttgatgtgctgctggattcggtttgccagtattttattgaggatttttgcatcaatgttcatcaaggatattggtctaaaattctcttttttggttgtgtctctgcccggctttggtatcagcatgatgctggcctcataaaatgagttagggaggattccctctttttctattgattggaatagtttcagaaggaatggtaccagttcctccatgtacctctggtagaattcggctgtgaatccatctggtcctggactctttttggttggtaaactattgattattgccacaatttcagagcctgttattggtctattcagagattcaacttcttcctggtttagtcttgggagagtgtatgtgtcgaggaatgtatccatttcttctagattttctagtttatttgcgtagaggtgtttgtagtattctctgatggtagtttgtatttctgtgggatcggtggtgatatcccctttatcattttttattgtgtctatttgattcttctctctttttttctttattagtcttgctagcggtctatcaattttgttgatcctttcaaaaaaccagctcctggattcattgattttttgaagggttttttgtgtctctatttccttcagttctgctctgattttagttatttcttgccttctgctagcttttgaatgtgtttgctcttgcttttctagttcttttaattgtgatgttagggtgtcaattttggatctttcctgctttctcttgtaggcatttagtgctataaatttccctctacacactgctttgaatgcgtcccagagattctggtatgtggtgtctttgttctcgttggtttcaaagaacatctttatttctgccttcatttcgttatgtacccagtagtcattcaggagcaggttgttcagtttccatgtagttgagcggctttgagtgagattcttaatcctgagttctagtttgattgcactgtggtctgagagatagtttgttataatttctgttcttttacatttgctgaggagagctttacttccaactatgtggtcaattttggaataggtgtggtgtggtgctgaaaaaaatgtatattctgttgatttggggtggagagttctgtagatgtctattaggtctgcttggtgcagagctgagttcaattcctgggtatccttgttgactttctgtctcgttgatctgtctaatgttgacagtggggtgttaaagtctcccattattaatgtgtgggagtctaagtctctttgtaggtcactgaggacttgctttatgaatctgggtgctcctgtattgggtgcataaatatttaggatagttagctcctcttgttgaattgatccctttaccattatgtaatggccttctttgtctcttttgatctttgttggtttaaagtctgttttatcagagactaggattgcaacccctgcctttttttgttttccattggcttggtagatcttcctccatccttttattttgagcctatgtgtgtctctgcacgtgagatgggtttcctgaatacagcacactgatgggtcttgactctttatccaacttgccagtctgtgtcttttaattgcagaatttagtccatttatatttaaagttaatattgttatgtgtgaatttgatcctgtcattatgatgttagctggtgattttgctcattagttgatgcagtttcttcctagtctcgatggtctttacattttggcatgattttgcagcggctggtaccagttgttcctttccatgtttagcgcttccttcaggagctcttttagggcaggcctggtggtgacaaaatctctcaacatttgcttgtctataaagtattttatttctccttcacttatgaagcttagtttggctggatatgaaattctgggttgaaaattcttttctttaagaatgttgaatattggcccccactctcttctggcttgtagggtttctgccgagagatccgctgttagtctgatgggctttcctttgagggtaacccgacctttctctctggctgcccttaacattttttccttcatttcaactttggtgaatctgacaattatgtgtcttggagttgctcttctcgaggagtatctttgtggcgttctctgtatttcctgaatctgaacgttggcctgccttgctagattggggaagttctcctggataatatcctgcagagtgttttccaacttggttccattctccacatcactttcaggtacaccaatcagacgtagatttggtcttttcacatagtcccacatttcttggaggctttgctcatttctttttattcttttttctctaaacttcccttctcgcttcatttcattcatttcatcttccattggtgataccctttcttccagttgatcgcatcggctcctgaggcttctgcattcttcacgtagttctcgagccttggttttcagctccatcagctcctttaagcacttctctgtattggttattctagttatacattcttctaaatttttttcaaagttttcaacttctttgcctttggtttgaatgtcctcccgtagctcagagtaatttgatcgtctgaagccttcttctctcagctcgtcaaaatcattctccatccagctttgttctgttgctggtgaggaactgcgttcctttggaggaggagaggcgctctgcgttttagagtttccagtttttctgttctgttttttccccatctttgtggttttatctacttttggtctttgatgatggtgatgtacagatgggttttcggtgtagatgtcctttctggttgttagttttccttctaacagacaggaccctcagctgcaggtctgttggaataccctgccgtgtgaggtgtcagtgtgcccctgctggggggtgcctcccagttaggctgctcgggggtcaggagtcagggacccacttgaggaggcagactgcccgttctcagatctccagctgcgtgctgggagaaccactgctctcttcaaagctgtcagacagggacacttaagtctgcagaggttactgctgtctttttgtttgtctgtgccctgcccccagaggtggagcctacagaggcaggcaggcctccttgagctgtggtgggctccacccagttcgagcttcccggctgctttgtttacctaagcaagcctgggcaatggcgggcgcccctcccccagcctcgttgccgccttgcagtttgatctcagactgctgtgctagcaatcagcgagattccgtgggcgtaggaccctccgagccaggtgtgggatatagtctcgtcgtgcgccgtttcttaagccggtctgaaaagcgcaatattcgggtgggagtgacccgattttccaggtgcgtccgtcacccctttctttgactcggaaagggaactccctgaccccttgcgcttcccaggtgaggcaatgcctcgccctgcttcggctcgcgcacggtgcgcacacacactggcctgcgcccactgtctggcactccctagtgagatgaacccggtacctcagatggaaatgcagaaatcaccgtcttctgcgtcgctcacgctgggagctgtagaccggagctgttcctattcggccatcttggctcctcccgctttgttttctttttcatctcagtttttgaggataagaatgctttgttttaaaagggatcatctgtgtctttttaaaagcttactgaattttcctggtgtgaattatttgcacgtactcatttttgtggttgatttggattttacagtgattaagattttacagtacctgctccaccgggcccagatcctgcttcccagatcttcctgggaagcaccaagaaatttagattttattctaagtgtgatgtaaagtcattaaaatgttttaagcaggtgagtaaaaggatctgatttttaaaaatcactgtacgtggccaggcgcagtggctcacgcctgtaatcccagcactttgggaggccgaggcaggtggatcacatgaagtcaggagttcaagaccagctgggcaacatggtgaaaccccgtctgtactaacatacaaaaaaattagccaggcctggtggtgcacacctgtaatcccagctactcaggaagctgaggcaggagaatcgcttgaacccgggagacggaggttgcaatgagccgagattgcgccgctgcactccagcctgggtgacagagcgagactccatctcaaaaaataataataataatacatcactgtacaagaatggactcccagtgggagaaggcaagatcgctaaggaaactgctgcaacaatccacatgcgcagtggtgccttggcagtgcaggtaagagttcagtcaagaaatttggaagattgttaacatcctaagactggatatagatggaccttgatttatcacaagttgattataattgacctgttatgtaattcgtgttacttagtgtctttttgttttagttgtggggagcaccagattacagaatgattaccttgactcatgacccagggctctttacaattcttaccagaaactggcagatgataaatcagtcatcttatttggtagcaaaataaggaggttactttcctgcatgaacataaatttcctcttttcaatatttcagtcttacattagcaggaggaacttgaagtcttgtgattaggcagattctttgtaagggaaaaggcagcttactatccttttggtaacagttctttactgatagggtaagaaggaaaggaggttgagtccgaacaatgctaaaggaaacactttaaagtaagacatccactgaagacccctagccattttgcctactgtaaaatagaaccatctacaatgtcttgtgaagagagaaatgaaatgaattttgatatttgttttctgcaaagattctacattacattgtgtaagtcttgacccacgatttttataactcatgcataaaattatgtgcaaatgctttaaaaattccagcccactcttatactgagcattttatgtactcattcagcaaaccattcattgagcaccagtcatgtgtcagctgctgcttaaggcactagagatacgaaaattaaaaagacccagtcctcacagagttcacagaacactaggaaaaatagacatgtaaattggacatgattacagtacaattgtgaaagaggtctctttgaaagagttgtctgtatttatttaccatctccagtctttcttttcccattctctctctttttttttttttttttttttgagacagaatctcactctgtcacccaggctggagtgcagtggcacaatcttggctcactgcaacctccacctcccaggttcaagcgattctcatgcctcagcctcccgagtggccgggattacaggcatctgccaccatgcccggctaatttttgtatttttagcagagacagggttttgccatgttggcaaggctggtttcgaactcctgacctcaggtgatctacttcccttggcttcccaaagtgctagaattaacaggtgtgagccaccgcgcccagcccccattctctattctctctctctctctcttttttttttttttttttgagacagagtcttactctgttgcccaggctggagtgcagtggcacaatctcagctcactgcaacctccgcctcccgggttcaagcaattctcctgcctcagcctcccaagtagctgggattacaaccaggctgggagattcagcttgtccatttcatgttctgtttctcacaatcatctgtgtttgcttgtcactgcactttaaagagaaggcataactcaaaagtttcacccttcaacttgatggagaattattttttatttatttatttatttatttatttatttttatttttttgaaacagggtttttctctgttgcccaggctggattgccgtggtgcaatctcggctcactgcagcctcaacttcctgggctcggtcgatcctcctgcctcaggatctactccctcctgagtagctgggactacaggtacatgccatcatgcccggctaatttttttttcttttgtagagatgaggtttcgtcatgttgcccaggctggtcttggactcctgggatcaagcgatctgccagcctcagcctcccaaagtgctggaattacaggcatgagccactgcacccagccattctatatttttaaagcatagaatattgattctttgagctggattaatgaggaaagatataacaatcattaatataaaataaagaattgtgaaacctcattaatttgcatgccactaacctaaaattgtaataacccagggcttagtaagcaaattagtcatataaacagcataactatagggatatttaaactgtttaccaaaagaagctgcttttaaagcctgctgaagtacttatttattactaataatgtctaatattattgacacttataatgttgctggcactcttcattgtcttatttaatttccatagcaactctaagagctaggtattatcactcccatttttgaaataaagaaattgaggccaggcgcagtggctcatgcctgtaatcccagcactttgggaggccgaggtgggtggatcacgaggtcgagagatcgagatcaccctgaccaacatggtgaaaccccatctctactaaaaatacaaaaaaagccaggcatggtggcaggcacctgtaatcccagctacttgggaggctgaggcaggagaatcacttgaacccaggaggcggaagttgcagtgagccaagatcgtggcattgcactccagcctgggcaaaaagagtgaaactgtgtctcaaaaaaaaaaaaaaaagaagaaattgaagctcagagaagttaaggaactcactgggtgcagtggctcacgcctgtaatcccagcactttggcaggccgaggtgggtggctcacttgaggtcaggagtttgagaccagcctggccaacatggcaaaaccctgtctctacgaaaaatacaaaaattagccaggcgatgtggcacgtgcctgtaatcccagctactcaggaggttgaggcacaagaatcgcttgaaactgggaggcagaggttgcagtgagccaagatcatgccactgcactgcagcagcctgggtgacagagtaagaccctgtctccaaaaaaaaaaaaaaaaaaaaaaaaaaaggaacttgcttaagatcaaaaatagctaatgagtagaagagacaagggttccaatccaggtctgtgtgatgctgaagcccacaggcagaagattcgcactctacctaggcttccacagatcactcaaccatgcatgaaagtaaggcctgaaaagtgtctctactaggttgcccttcattaatctagttccagtcatgtataataaaatggagtgtctttccaaaatttcataatttagatttcactcatttaggccgacttcccccctatacatacccactagttggaattagttgccttttactatatgctgtattgaatgtccttatagttgggggtcatgagaaaagctaaagtctaacttggacaagatgacgactggcattgccagggttgtgcagcaacagtagtggggtggggtgtcctgcaaggacatgagttaggtggctgttaggggcagcataagttgtagtgtaaagccttggagcctagatgccaaggtcgcagagtcaccaggaggcaggatcctggagtacagattgcagtggcccagtaggcacagcatctggcctctaggtctgcctctgctatgcaccagctgggggctttggttaagttgctctgcttctccaggtcataggtttttgtttgtgaaacgaataattggaagggaagatcttagggtccatttcagattggggtctctggtttagggatctgcgttatcagagtctaaagtaatcaagtccttggagatctagtaatcagaaggagagcaagaaagagccagctttcattgtcaggggcaacaaagaggtggctcatgcccataatcccagcactttgggaggccgaggcaggaggatcacctgaggtcaagagtttgaggccagcctggccaacatggtgaaaccccacctctactaaaagtacaaaaattagctgggtgtggtggcatgcacctgcaatcccagctactcgggaggctgaggcaggagaattgcttgaatctgggaggcagaggttgcagtgagccgagatcaaccactgctctctagcctgagtgacagagtgggactccatctcaaaaaaaaaaaaaaaaaaaaaaaaaaagaaagtccagaaagcctggtttgaatcagtaaaatcgagttttcacactgcttcactgattgtaattcattcttctacagatttttaaggagggtggaagagagaaaagctaagtaaaatgtggtcctagccatcacaggtctcatagtatcctgagggaaagagacaggaaacaactaactggaatataaaacagaataaaatgtgttcattacctgctgtatgaccttggtcaaatcacttaacctgtccctgagcctcagtttcctcaactttaacagacacataagcagtcaataaatgtcagcagctatgcatcagtagtggcaatagtaatatggactacatgtgtaatattttgtactatgccattacatcttagtaaaatagaaccatctacaatgtcttgtgaagagagaaatgaaatgaattttgatatttgttttctgcaaagattctacattacattgtataagtcttgacctaccgtttttataactcatgcataaaattatgtgaaaatgctttaaaaattccagcccactcttatactgggcattttatgtactcattcagcaagccattcattgagcaccagtcatgtgtcagctgctgcttaaggcactagagatacagaaattaaaaagacccagtcctcagagttcacagaacactaggaaaaacagacatgtaaattggacatgattacagtacaattgtgaaagaggcctctttgaaagagttgtctatattcaccatctccaatctttctcttcccattctctttttttttgagacagagtctcactctgttgcccaggctggagtgcagtggcgtgatctcagctcactgcaacctccacctcccgggttcaagtgattctcatgactcagcttcctgagtagctgggattacaggcacccaccaccatgcccagctcatttttgtatttttagcagagacagggttttgccatgttggccaggctggtctctaactcctgacctcaggtgatccacttgccttggcctcccaaagtgctagaattacaggcgtgagccaccatgcccagcccgattctctcttgagtccattccagtcagacttttgctccaccatccaataaacttctcttttattttttgagacatggactcactctatcgcccaggctggagtacagtggcacaatcatggttcactgcagcctcaacctcatgggctcaagcaaccctcccacctcagcccccccaagtaactgggactacaggtgtgcaccaccacacccagctaatttttatattttttgcagagataggggtcccactgtgttgcccaggctggtcttgaactcctgggctcaagcaatcctccccctatggcctcccaaagtgctgggattgcacatgtgagccactgcacccagccaaaacttctctttttatgataaccagtgacctccatgtgtttagatccaatggtcacttctcagtcttcatcttactgggccctcagcagctcaccactcctccttgacataccaccttcacttggcttcctggacaccacactttccttttccttcttcaccaactgctccttctcagtcttctttgtggggtctaatgtggaagtatccccaggctcaagccctaagtgatctcatctggtctcctggctttaaataccacccatgtactgatcactccctaattatgtctccggccctgacctctcccctgaactccagactcatgtagccaactctccatctccatttgaatggctaacaagcattgcgcagttgaactcctgatgttttcacccaccctcaaaaaacaaaaacaaaaagccaacctgcttctcccatagcgtcctccatctcagttcatggcacttctgtctatcccgtcacttaggccagaaactttagagccatccttgactctcctctcacaccctcatccagtccatcagccaatcctgttgactctaccttcagaatatatcgagtctgatcactgctcaccactccaccactagcatcccagtccaagctaccgtcatctcttgcctaaattactctagtaatctcctaaccagtctccatcctacttttccctccattcttgagtctttttcaacacagcagccagtgatcatgtgaaaatataaattaggtcatgccattcttctattcataaccccccccagtgaccagtcttctcagtaaaagccaaaattcttactgtgtgccctaccagccttatacaacctagccaccatttacttttgtgaagtcatatcccattactctctattttgttcattccattaccaccacattggcctcctcattgcctctgtaacaccccggacatgctcctgtcccagggcctttgaagatatctgtacaacttgcttcctcacttccttcagatctccaaaaagccatcttcttggtgaggtcttctctgattaccctaataaaaacttcagcatcctccagacactccttatgttccccctgcttttattttatccagagcactcacctcctcttagtatttggtgtaatttacttatttattttctttctttgtcttgtcttcccctgcaattagactttcagctttataggaacagggacttttgtctgtttggttcactaatgtatcctgagtgtcgggcatatagtaagtatcaataaatatgcaaataaatgaatagtctttagaggagataatgggagtataaaaaagagctaaggagtgcagtcagtatgattggggtgagtgatgcttttcatgttggaaaagttgtcatgaagggccttacatgtcattctaaggagcttagattttatcctataggcggtaaaatgtcagtaaagtagtcagtggtctgaattggaattttagaaatgcgttctggctgtagtataaagaatgaggccgggcacggtggctcatacctgtaatctcagcactttgggaggccgaggcaggtggatcacctgaggtcaggagttcaagaccagcctgcccaacacagggaaaccccatctctactaaaaatacaaaaattaggcaggtgcgatggcatgcacctgtaatcccagctacttgggaggctgaggcaggagaattgcttgaacccaggaggcagaggttgcagtgagccgagatcgtgtgactgcactccaacctgagcaacagagcgagactctgtctcaaaaaaaaaaaaaaaagaagaagaatgaattggaggctgggtgtaatggcttatacctgtaatcctagcactatgggaggccaaggtgggaggatcacgtgagcccagaaattcaagaccagcctgggcaacatagggaaaccctgtctctacaaaaaatacaaaaattagcagggcatggtggcacatgccagtagtcccagctaccagggaggctaaggtgggaggatcacctgagcccaggaggttgaggctgcagtgagccgttattgcaccattgcactccagcctgggtaacagagcgagactctgtctcaaaaaaagaaagaaaagaaaagaaaagaaaagaattgaaaaggacaagagtgggtccaagaggccagtaacagactgctacagtaatgcacacatgagatggtggtagcctgaattatgggagtgccagtggggatggaaaggaggattgcttggatagggcagtaagggtgggcgaaatgaaggaattccaggtttctggcttggggtagcttgttaaagacttgggccattcatcactgagataagaaatacagaagaaagaataaatctgacactgtcaagaagaaaggcaacgatagattctaggtgtgtcgagttttgagtacttgtgtactatccaggtagagctgcccagtaggcagttaggtgcttggttttggaggtcagtgggaggtcagagccaaagataaagatttgggagccatctgcctgtaggaggtgtttaaagcaaaagctatggtagaatttcctagaaaaggtatataaattgaggaggaccaaaagagttcctggttatcagtgccaaatattgccccctaagaaatccagtaataatatagccaaaaagagccactggatttggaaaccaggaggtcgacaatggaatacatttcatttattcaaatgtttattaaatatctactatgtgttaagaatactaaggatacagaagtcaataaaacagatcaaaaaatccctccttacatgtagctgaaattctagttgcagagaaggagcagataaataaaggaaataaataagtaaattattccaaatattaaaaggcagtgaatgctctgaaggttagataagctgcctagggtcacagggccaagtaagtgaagaaactaggactagaaacgaacctgctcaactccagagttgtgctcttcttactgttgtaccacacctcctctcccacatcgataatcttggttccattgccacagaatgccatatagccccaactaaacatttcagaaacaaaccaaagtatgtgtatagcttaatctaaactcaacaccatttctgaaagccagctctgaggggacatccccttcacagtggacaggtagtaccagttttatatgtagatggtatattgaaaagtcatttcatctgatcgtaaaattatttttctaagaggatggctgggtgcagtggctcacgcctgtaatcctagcactttgggaggccaaggcaggtggatcacttgaggccaggagtttcagaccagcctggccaacatcgtgaaaccccatctctactaaaaatataaaaattagccaggtgtggtggtgtgcacctgtagtcctagatactcaggaggctgtgacaggagaatcgcttgaacccgggaggtggaggctgcagtgagccgagatcatgccactgcacaccagcctgggcaacagagtgtgagactctgtcgcaaaaaaaataataatattaaaggagaaaacgttcctttcagagatggagcattttggtaataatagggttccgtcaggatggctctgaaggtggtgatgatgtccacggggtggccaaaatggtataaaggtgaggatcactgaagccgaaggccagaaactggtcatgggctgggtcgtctttatagatgccaaagttacctaagatgacggcgaggctaggagagggtgagccaccaggtatcacagtcttcaatgaacgtggaagagtggccagattagtagataatagcaggccaaggagtatggttcagtgacatcagccccagctaagtgcttctgtcgtgagagtgaaggaggaagggtttgggaacagcaacagagagcgagaagaatgccaccatcacaatgctccctaccctgtcacatctgtgaggtggagaaatgaacagcctccgcttgggagcttcacaggggaaggaccagtaaagacaaggaaacagaatactttaaaaaggctaagggcatgggattatgtttatcatgtccagaaggcacaggttgggagggaatgtaagtatgaaattgaatctgtcccaaatgtctgcttccttccaggcaaaataaacgacaaatatatggacagggtatcatgattgtattgcacgttaatatctgttctaagcccacagaacaagaagaaccccacagcagccattctttgccatcatcttggccaggaacccagcatccagaatgtagacttgagaccctggctccttccactaggacatttatttcctaatgtttcaatcacctcatcccagcttctgtttcctgtcaggctcagagcccctacctcccacacagtggaggagtagatgtccatttctcaggagcagtggactgcttccggcagatagtgaaggcccagggggtcctggggctctggaatggattgacagccaatttactgaaggtgagaagagccaccagcctccgctgctcccctgcctcttccaattctaccctcttcctttgtcacccccaacccctactacagtttgcttggaaaaccccctctagcactaatgggtagcacaaggcccatgaatgcacactgtctgtcagccccgtagagaggggaacctgtgcagtggtggagtatcttataccccattccagaggagctgagcatttagtgcagagatacttaatgtggaggttcatgggcccctaatgggaacctaacccctcatcctaaaattctatgcaaaaatgtatgtgtatatgcatatgtgcatcatattcccaaagaactccatgacaaaaaaaaaaaaaaacaaaaacaaaaaacattaagcactctggactaaccttgcactagctggcatgtaaatgattccagtcaaggccagcatatagtgacaggtagtatcagatagtctgcgtgcatatgacccagatctagtgcctcccaggcaggtcatgcccttcaatcactgtcattcctctcccaacccacactgagccagctttccttttgccatctttcctgattccaaaaagagttaccatttgtattgccaccgccattatctcactttacaagataatttaccctgatccaagttgactgcagacacattgatgttttctttttaagaacttaacttgattttcatttttggttttaacagatagttccatattttggaattatgtttagcacctttgagttctgcaagagaatctgtctttatcaaaatggttacattctgtctccactgagctataaattgaccccaggagtcgatcagagtttgcagccccaggaattacgagaattaaagaagttcttcaaaacgagaaaaccgaagcctaaaaaaccaactctataaaatggaatggaactagaagtgcactgactgacagcatgttgcaatcacagataaatgtagcctcataactgtgcacctgaggagggatgagaagctactgctatctgctgctctgggaaatgagatggtttggccatgcaccacctcagatctccaaactgatgtccctgtgaacacctgcactatgagaaggtttcccaacaagagtgtatcatgatggcattccacgagattttataaccagagtctagcagtgataaaatgtacaatttacgctctgaatagaaacatgacaccaaagaaagggcattgccatgacatctcaaagcaacaggtaattgaagtggctgagtggataccacgttgtgaggtcagccactgggtcacttgtagtcaatgcaaagcttgcacaaaccaacgtcagcctagtttcactcagtttgacctgagactttccaatacaatctgttgttttgttttgtttttagagacagggtcttgctctgtcacccagactggagtacaatgacacaatcatagctcactgcagcctttaactactgggctcaagacatcctcctgcttcagcctccagagagttgggaccataggtgcacaccaccacacctagctaattttttggggaggtcttgctatgttgcccaggctggtcttgaactcctgggctcatgcaatcctcctgccttggcctcccaaagcgctaggattagaggtgtgagccgctgcaccctgccccagtacaatcttttttgaactcaaatttttgctgacatctgagtgcacacaccacagtgtaaattatgccttatcagaatctaaatgaaaatagcgaacatttaaaagctatcaccattgtagtagaatcatccttcttttttgaaatttgaagcatcccaggcttaaaatcttgtgtttcagaaagacagtttataccatgactgcttaattatccccccaaagaccttctgattgaagtcatgtacagttcagtggcctaaattctctgcctttttaacttgctttgcaagcctactctgaaaataagttatttagtcaagttattctcaaagatgtcccagttgcctagaaaggatcaaatggaacatttgacacacatactcaaaaaaatgtaactgactataaacactttaacctaatcatctgtatcaaactttctaaaaatcaaatctcaggattgttccactttagagattctatgtaaagtttatataactatacttgtcaaatagcacctatctatgcatttaaaaatgcattaatatctaacataaaattgttaatttatacacacacatacactcatacatagagagagattttcggtatgttgcaagtattttttccgattaaatttattttccaaagaaaaaatgatgtgttggtcatttattgctagtctgagttataaaactatggttaaatacatattggccaaatctgtaaactctcaaagccttatcctatttaagtataccaaaataattcacttttccaactgctgcggcattctgttttatggagaatggcagttaacacacacacacatggaaatctcatctgtagctcaatctgttagagtttggagggtggcagattctttacccaaagtgaatagttcatgtttattactctttattttccttgaaacagacaacttttcaaacagttctgaaagctgcaaaaatattttttacttttttaactataaaatcctaacctcacattatttcatgataatatcttgtgtattcttccacaagtaattttttttttaatttgaaaaaaaaaattgtcacccaggctggagtccaatggcgtgatctcagctcactggaacctcctcccgggttcgagcagttctccagcttcagcctcccgagtagctgggattacaggcgcctgccaccatgcctggctaatttttgtatttgtagtagagacagggtttcaccatgttggccaggctggtctcgaactcctgaccttaggtgatctgcccacctctgcctcccaaagtgctgggattacaggtgtgagccaccacaccctgcccttccacaagtattattaaatagatagctaaactcttgcagttgtcatgcacagaaatgttttctgagctgcagttttgattttttcttcattaaattaagtggggaaaataatacgcctgatttttctaatttcagaagaactctaaaactcttgttctgtttctaaaataaacttccagctaatttcattttctttggattatgaagagagagttctgcctttctgctttatggctgacagtgagcaccacactggactaagtacttgagaaggattataaagatgtgtgatgcaatgttgactcaggaggaatttatggtcttgaggaacaaatcatacctacatatatgaaatgactatgattacaaagcaaatacaagcaaaggcatgataatgtagtatgaactgttcataagattgccaagaagctctatacaaacttagtgaataaaaaactaaagggatcatcacatgggagagagactagtgatcaacagggatttggggaggttgtgagtctttttttttttttttttttgaaacagagtctcgttctgttgcccagcctggagtgcagagatgcaatcttggcttactgcaacctccacctcctggttcaagtgattctcgtgcctcagcctcctgagtggctgggactacaggcgcctgccaccatgcccagctaatgtttgtattttcttggtagagacggggtttcaccatgttggccaggctggtcttgaactcgtgacctcaggtgatccacctgcctcagcctcccaaagtgctgggattacaggcatgacccaccgcacccagccatgagtcttgaactaagttttgaaagaagttaagggatatgtattggtcacgaataggaaggcattgcaggttaaaggcagggcattgcagcatcacagagatggaagcaagcaaaagtgggtcagagcaagaaaagtggctttgtgcatttattcaataactgctaggcactacagacacagtggcacaaaaggcagataaggtccttgccttcaaggagcttacactctagtgagagtggcagtcaataaacaagtaaactaataaataatttaggtaatcatggactgtgatgttatgaaggtgcttatatagagggtgctttattagagaattatgtggaggtaaggggaatattttatttttggtttttgttttgagacaaggtctcgctctgtcgcctaggctggagtgcagtggcgcgatttcagcttactgcaacctctgtctccccggctgaagtcacaggggaatattttaaatcagggagccagagaaggccactctgacaggtgacatttgagatgagaccagaaggatgagaatgagccaactatgcaaagaaccagggagggctggtcaaagtgcagtggtgtttacaagtaattgaccacaatcagctacagatttctttgttccttcccactcccactgcttcacttgacttgccctaaaaaaaaaaagaaaaaaagaagggctgggcgcggtggctcacgcctgtaatcccagcactttgggaggccaaggcaggcggatcacttggtcagaaatttgacaccagcctggccaacatggtgaaaccccgtctctactaaaaacgcaaaaattagctgggcctggtagcacacacctgtaatcccagctactcaggaggctgaggcaggagaatcccttgaacccgggaggcggaggttgcagtgagccgagattgcaccactgcactccagcctgggtgacagagcgagactccgtcaaaaaaaagaaagaaaggacagaaaggaaagaaagagagagagagaaagaaaggaaagaaaggaaagaaagaaaaaaaaggaaagaaaggaaaagagaaagaaagaaagaaagaaagaaagaaagaaagaaagaaagaaagaaagaaaaaggaagaaagaaagaaagaaagaaagaaagaaagaaagaaagaaagaaagaaagaaagaaagaaaggaaggaaagaaagaaagaaagaaagaaagaagagaaagaaaggagagaaagaacgagggagaagagcattcctggaaagaagagaaagaaagaaaggagagaaagaacgagggagaagagcattcctggcagagggaagaacaagcacagaagtgtggcagtgggaaagccttggtgaacagaaaggaggcgagggtagccagagtgtggtgagagagtgggatgagatgagattggagagagacagccaggtcttatgtggccatgtgggccagaacaagaagttaaattttattctaaatgctgtggggaggcattgaaggtttttaagcagaaaagcgatataatctgactttgatttttataagattactcagttgctgtgtggagaatggattggagggaagcaaggctgtgagtgagaagaccagttaagaagcgatttcggaagtccaagcaagaaaggatggcttggactagaatggtggcaataaagatggagaggaatgaatgagttcaagatgtattttgaaggtggactcagcatgatttgctgaaggattgaatatagggagttaaagaaaggagtcaagggtggcacctaggtttttggtttttgtttttctgagacaggatatcactctgctcccccaggctggagtgcagtggcgcagtggcgcaatctcggctcactgcaacttccgcctcccaggttcaagcaatcctcccacctcagcctcccaagtagctgggattataggcatgcaccaccacgcccagctaatttttgtattttttgtggacatgggatttcaccatgttgcccaggctggtctcgaactcctgagctcaagtgatcaaggcctgcctcggcctcccaaagtgctgggattacagatgtgagccaccgagcctggctggtttttgccttttgacttgagaacaggtagatgatcttgccatttgctgatgtgaggaagactgaggagggacagagttttggtggggaggaattcaaagttctgttttggacatgttaaattcaaaatgcccatgagacatgcaagtagagaagtagacagtgggctggagcacatgctgtctgtgtaattgtccaaaccagtcgtggtaagcagaataatggccctcaccaaagatgtccacaccttaacccccagaacctgtgagtatgttacctttcatgacaaaagagactttgcagatgtgattactgttacagacattgagatggagggattctcctggattcattgggtgggcccctaatcacaatccttaaaatcacaagtggggccaggcacggtggctcacggctataatcccagcactttgggcggccaaggcgggtggatcatttgaggtcaggggtttgagaccagcctggccaacatggtgaaaccccacctctactaaaaatacaaaaattagccgggtgtggtggcacacacctgtaattccagctactcaggaggctgaggcaggagcatcgcttgaacctgggaggtggaggttgcagtgagccaagatcacaccactacaatccagcctgggtgacagagtgagactttgtctcaaaaaaaagaaaaaaaaaaaatcacaagtggaagaggaagacagaagaatgggtcagggagatgcaaggatggaagaagaggcaggagaaatgaggcctgagaagaactggactcgccactgctggctttgaagacaaaggtttccaggtgccaagaaatgggtatggcctctagaagctgagcatgaccctcagctgacagccagcaaggaaacaaaggacttcagccctacagtcacaatgaactgaactcagccaagaacctgaataagcaagctaaccaattcacctctggagcctccagagaggcatgcaggcctgccgacacttcgattttggcccagtgagacccacgtcagacttgtgactacagaactacaagctaataaatttgtgttgtttaagccaatgcatttgtggtaatttgttatagcagccataggaaactagtatatcagaactttattgataattatttcaggataatagggacaagtctagagtgtggggaagagtgatgactggagataggaatttgggtgtcatcagcagatagatggcaagggactgagtaagagcagcaaaggagtggatgggaagaaacttctgggggagttggaagcaacaaaaactgacactcaggatggtggccaaagaaaggcctcaagggacgtgaggccgggcatggtgactcatgcctataatccccgcactttgggaggccgaggtgggtgaatctcttgaggtcaggagtttgagaccagcctggccaacatagtgaaaccccatctctacaaaaatacaaaaattacctgggtgtggtggcgggcacatgtaatcccagatacttgggagggtgaggcaggagaattgcttcagcccgggaggcggaggttgccgtgagttgagatcacaccactgcactccagcctgggcaacagagcaagactctgtctcaaaaaaaaaaaaaaaaagatgggacttgaaccaggcatgctgacttgaagccctagtacattctattgtgatgcaggtgcctctaatctaatcacagacaatgaggaggaaaaaaaacaagtataacaacaataggagactggagaagggatagacacggggaaagtcggggcaagttggggcaagtcgggaaaagtcgtgtactagcagaaagcaaaaataaattcttcagtcattcgtatctctcccttttgttgtcattgctagccaaaaataaaagtaatatccaaactaactgatatgatattcaggtccatttgacagctgttacttaggaactgtctaaaatattccaatggggccaggcacagtggctcatgcctgtaatctcagcactttgggaggccaaggtgggaggactgcttgagtccaaagagttcaagacaagcttgggcaacatagggagatcctgtctctacaaaaaaatttaagaattagccagaggtggtggcaggtgcctgtggtcccagctaatcgagaggctgaggtgggagggtcacttgagcccaggaggtcaaggatgtagtgacagtgagccatgatcacgccactgcactccagcctgggcgacagagtgaaaccttatctcaaaaataaatataaataaataaataaaatattacaataggatgatggaaacgaggggggtgtgtttgacatacagcaaagcacatatagctatagtagtcatcagaagataaataccacatattagatcctgaaataaatatttttgctcacatctctaaaaggaaacttgaaataaaatttcatgtactcattatgtttactttggaattagaagttatacatctttatcaaagatgaatctctgctccattttcaataagctcacctggggatcctgattgttataccaagctgcctgattttatatatatcaaattacatttaattatatagatgcgatatgtaatttttcccataaagttatttagtcttactcagactaaagttggagatccataaagcaaaatgtatatgtgcagggggtgttttgtgtaaatttaggggtataagtacaattttgttatatgactacattgcttagtagggaggtctcgtcttcatataaccatcacttgaataatgtacattttaccctgcacaggtttagaagctagtcacagcttataaaatttattaaaatatgtcaaatatttctaagttaaatttttctgagttaaattatttatatgcaattgggccatatgcagtggctcatgcctgtaatcccagcactttggaaggccgaggctggtggatcacttgaggtcaggagttcaagaccagcccagccaagatggtgaaaccccatctctactaaaaatacaaaaattagccaggcatggtggtgtgcgcctgtaatcccagctacctgggaggctgaggcaggagaatcgcttgaactcgggaggtggaggttgcagtgagccaagatcacaccactgtactccaggttgggcaacagagcaagacattatctcaaaaaaaatttatatacaattgcatttaaatggtaactaaccacccccattgggcaacatagggagaccctgtctctacaaaaaaatttgaaaattagccaggggtggtggcaggcacctgtggtcccagctaatcgagaggctgaggtgggagggtcacttgagcccaggaggtcaaggttgcagtgcctgatgtggaggaactggaactcttgtatcccgctgttgagaatgtaaaatggtataatcactctgggaaaaaacttgggcaggtcctcaaatggttcaacatagagttaacatgtgacccagtaattccactcctaggtgacaaccccagaaataaaaacatacgtccacacagaaacttgtataggaaagtttatagcagtgtcattcataataggcaaaaagtggaaatgagccaatgtccatcaaatgatgaataaacaaaatgtgggccaggcatggtggctcatgcctgtaatcccagcactttgggaggccaaggcgggtggatcacctgaggtccaggagtttgagaccagcctgaccaacatggtgaaaccctgtctctactaaaaatacaaaaattagccaggcatggtggtgcatgcctgtaatcccagctacttgggcagctgaggtaggagaatcgcttgaacccaggaggcagagttcacagtgagccaagattgtgccgttgcactccagcctgggcaacaagagcgaaactccatctcaaaaaaaaaaaaaaaaaaaaaaaaagtggcatatctgtacaatggaatactacttagcaacagaaagtaaataactattgatacgcacaacatgaatgaatctcaaagagtaacatgccaagtgagagaagctagaccccagaaagaagagtgcataatatatgatctcatttatacaaaattctaggaaatgcaaaattctaggaaactaatctatagtgacagaaagcagatcaaagtttgcttggggatggagagattacaaaggggcacaagaaaattttgtgtggtaatggatatgttcatgatcttaattgtgatggcttcacatgtgtatacatgtgaaaaaacttagcaaattgtgcactataaatatgtacagtcttattgtctgacaattacacctcaataagactgttgttttaagcagttacccatgggctggaatccaccaactgttgttttgttttgttttgttttgtttgagacagagtctcactctgtcacccatgctgtagtgcagcggtgcaatcacggctcaatgcaacctccacttccctggctcaggtgaccctcctgcctcagactcctgagtagctgtgactacaggcatgcaccaccatgcccagctaattgtttaattttttcgtagagatggggtttcaccctgttgccctggctggtcttaaactctgggctcacgatatcctcctgctttagcctcccaaagtgctgggattataggtgtgagccactatgcccagctgtatttttcttaaaattaataaaatctaacacatattaaatgctgttctatgcacatattatctcatttgcatgtgcctacagtcctctgaggtataggcactactatcattctcattttacacctgaagaaattgcagtttggagaggtaaagcaatttacccaagacctgacagctagcgaatggcagagccagaatttaaacttaagcaacctggttgcagggcccaccctcttaaccactgggctaaattacctttctcttcctatttgctccagattcccagacccagacgctcagatccactcactcttatagatacaaaaggatagagccacagaatcttagaattggaaagggtgtagaactctcttccagaccaacccagcgatctcccccatagcatccctaacaagtggctattctgcctcaacttttagccttcccagtaacaaaaagttcaccccatcgtatggcaacccattctacctttaagtatcgcatattttacaaactaatgtctttttgagctgaagtctaccttcatgaaacttctaccagcgggtttaattccatatagaatgtttaatttatgaagacagttatgatgtccttctttcacccaaagctctttcccagttaaatatctctcattcattcagccatttctcataatacatgatttatagacacttcactttcctgattgccttgtttgaatatgttccagtttgttaatgtcctcttaaatgtagcatccagaattaaatgtaaaactctatgggctggccaacagaaacccaagtggaactgaaagtccctctgatctggtcactaccattctcttagtgcaactcaagactcgttagtattttttggcattgtcaacccacagtgaactaggacctagttctctttttcacacatgctaccattaagctctatctcctcatccttaaatgtcttgcactaaatagggcattaaaaccctttattgcaatgcttcccattttataagcctgggtttattctggactttagcccttatgactcaattcctagaggtttgtgatattctttgggctttgtccttggaagcatagtcctccttctgtcatctatacatgcacttttaagatctgagctcatcagagaataatctataaggacactgtagtttattagaaatctctccctttttaatttatcattggaacttttccaaattctacagttctgaattttcaactggatccctctcccttttaagctatctttctcttttggtgttaggccagatcatacttatcttttctctgatccttttgaagtctaccttacacatacacatacatacaccgcacacacacacacacacacacacacacacacacacacacacacacgttaattaacctatgtgaccatgcccagcaattttttttttttttttttagtttttttgcttaacagatatccagatgacaggatcactttccccaagattcttgtcactttcactttgctaaccaaatcttccttatttattatcaggattaagcccagcttagcaatttacctcattgcttctttattcttttgagaactgtaattacactgtatcagcaagagagccaagaatctatcagatgttttcttaaatttaagatggtcttaaaaataagaaaaaagaatgtatcagatatgttgctatcagaataacttccagcagatattcagatgttctatgtctctgatcaccctttcctgttcgtctatgtgacagttttatgaaatgccattcatacttttatttattttatttattttttatttttatttttattttgagatggagtctcgctctgtcacccaggctggagtgcagcggcacgatgtgggttcactgcaacctctgcctcccgggttcaagcgattctcctgcctcagcctcctgagtagctaggattacaggcctgagtcaccgcacctggctgatttttgtatttttagtagagacggggttttaccatgttggccaggctgatctcaaactcctgaccgcaggtgatccacctgcctcggcctcccaaagtgctgggattataggcgtgagccaccgcgcccggccccattcatacttttaatctgagaagtctcttgtatacttctacaactataatcactttcatttctccgtttcattctcactgaatgcttttcaccctccagccaatgaattactagttataccttcttgacatattactgctctcttcttctgtatggtatctctgaatcaagttttccagatgccagccagaagttccaccctcccaagtctaaacaatacctataaaattgcattttcctgagtgtattaaaattttacattcccggccagtcgctgcggctcatgcctgtaatcccagcactttgggaggccaaagcaggcagatcacctgaggtcaggagtttgagagcagcctggccaacatggtaataacctgtctctactaaaaatacaaaaattagccaggcgtggtggtggcgtgcctgtaatcccagctactcaggaggctgaggctgaagaaccgcttgaacctaggaggtggaggttgcagtgagcggagatcgcgccattgcactccagcctgggcgacaagagcaaaactctgtctcaaaaaaaaaaaaattacattccctttattacccatattctgggtgttggtacatagatatctgaggccttaaaagtgtcatttctgactctcttccttgtttttccttgagaattactaggcattgccttagctttagttcctcttaattagacttatattttacatagcttccagaaacacaataattactaacacagcactatgtctcaatggaggaattagttttgattaactgaccagccatatatcattatcaacatcatcatcatcatcatcatcatcatcattaatattcttctcggctgggtgcagtggctcatacctgtaatcccagcaatttggaaggctaaggtgggaggatcacttgagcctaggagtttgaggctgcagtgagctatgatcgtgccgctgcactccagcctgggtgacagaatgagactctattttctattttcctggatgcttgctccttgtttctttttccttcttttttaaaaagtttttaaactttcagacttttttaaatgttgcaaaaatagtacaaaaatgtccttatatcctttattcaacttctctaaatcttacataaccaccataaccaagaatagtattggtaatctacagatattcaaacctcaccaatataaccaatgtcctttttctggtacaggagccggttgagtgtcatatattacattcagttgtcaagtatctttagtctcctttaatctgtgacagttccttagtctctttgtctttcatgatcttaacagtttcgagaatatctgactccttaaaatacacgcggtgataggtgactacgggagctccagctcaccgtggatttagcaaaataccaagtgatgacaagaagttgcttttaaatgacccatcttgtatttcatcgtcaataaaaccacacttagttacccaaagactgagaagggaaaaattctatgtaattatttgatcatctttttttgtggagagaaaaaaaactgacaaaacaatgagctctggaatagaatacagtagaggcatcatgctcaaagagagtagcagatgtggccagggaaaggtcacatgtagaaaagggatacacaagtgatggcgaggtgtatcgaggaataattaacagttgaataaaaatgcattaatcagaatgtcaagagttcaaactagaaagattttgaattttaaatgcattataaataaaatccacctctctccaaataaagccctctgtagaattttgctttagctcttgtttctctcaccagaatagagaagcgagtatcacctttggaggatatactctaccattctctgaaactgtttttttgcattcagctacctcgctattataatcagctgagaaacaccatagcctttcactaacacaggtcaaagatttctcccaggatcaacaaagctagattcaaaattgctcctttgaacacatgcaatttgtgtgcatcagtttcgatcgctggggttcttgaggagactaacaaattgcaaagtgtactttcagaggaagggcctaaccatcctggggggtcctagaattgggtcctttcacaggcagatctggagaagataggagagggcaggaaaggaaagtgaaggatatgaacactatgtgttcagtgtgcaaaggcctgctggcattttgcctatgggaattctgaagtctgggcacataaggttcagctgcagttgcagttttcaacagtcgtccttatttttataaacattgttatgattattcagacacggaacttgtgattacactatttgctcctgttctgaacttgagggagtccacttaagctaacaagtaggtttttgaggacatgtgtggcaaatgcttacccagtgaagggattaaggggctcagtaagcacttgtccattggcacaatggctgccaatctaattctattgattcctctaaatgtttctggagttcagaaatctattcaatccaagggcactttacctggggtcctgggagccaaatgttaacgtagttcttaaccttcctaagcctcttaaccttctgggtacaacctctatatttgtcttctggctaaaatcatttccccacccccagcccagtcctttggactctcccaggccaattcctggcaagatctttgtcgaactgtatttgcaaaccagggtctggggcacggtggcagttccttcgtctgctgttcccttaatttcgtctggtttcactggctccaggacagcacacggtctagagtgggaagagtgaggcattcaccttggtgaaaaacaactcagtaattaagacaaatgatttttcatgtactattttaaaaaaatcagaagcaatgcaaaaatccatgatgaacaaatgatcaacatttgaaatacagacaggatcccaacctgcacttgcatgaccttgtctcgcttgcctcaccctaaacccagccttgacactccaattaaactttatttacaaaacaagggggccggccagtaggatgtagtttgcccatacgacttttttaaagtatcgcattgactactgtttatctcgatgactgaagggttcttttggcatccctgtagcaaatgcgtctcaccctagtcctggtcctgctccaagggtttttgtccaggcacatcgtgacctcacccttcctcccctctccgaggcctctctcagggtccagcgttcaagtcccgggtgttctctggacccgccccttcctctcgccgggtcaggtgccgagggcgagcacgggcggcgcggagagcagtcccggcccgccctccacgactcctcctcctgcgagctgggccactcagcggctctgccgcccagcgcgccggggcccagaccccgccccggccccgcctccgacgcctgccgctccagctccggctccccctatataaatcggccatttgcttcgctccgccccgcagcgccggagtcaaagccggttcccggcccagtcccgtcctgcagcagtctgcctcctctttcaacatgacagatgccgctgtgtccttcgccaaggacttcctggcaggtggagtggccgcagccatctccaagacggcggtagcgcccatcgagcgggtcaagctgctgctgcaggtacgtcctgggatccaggagcccaaccaggaagtggggggaagggtcgcacagaaggcgggcgcccgaggggtggcggggagcgaactctaaagacatggccagggaagcggcttaggagaggccagagcggggcgcagaggcagaacagaagtcaaactggtgggaggcgcctttagtgacctgaagtagtgagtctaggaaggggccgggggcagagggcaggaccaggctctcggcatctccgaggcggcggactcggatggagcagtttctgagtgacggcctccccgggcctgggcgtcaagggcgaaggccgaaagccggcgttagaaagaggaacgccagttcttaccgaagacctcaaggtcgcggcaaggagataactgcccgggggaggccatgcgcccgggtccagcggcctcccagcccgcggacgcgctcaaacctcgccgggccggaagccggcgccgggaagcgcgtgtgccttttacgtccgcccccgcgcagccgcggccgctgccgccgcgtctccgcctgcctccctgcgccgcgcgctctccagtgccggctctagagggcgctcctgggctagcgtgtagggctggcggcggcggcgctcgggtcacctctgggagcggagtgggggcggagcgagacggaagcagctcaggagacttgaggcgtaggctgcggtccccaaggtgaccgcgccctatgtgggactcgccctaatgcctctgaacctgggtttgaggtaatgacctttctcctaggtctgaaggtcacgggtccgctggaggatgccccctctccactcagaggggtggaggcttaatgctactggtgcagatcacctcttcccctgtgacagcctcagagggttgggagggtccagccagtatgatatacgaagactagatttgagagaggggagcctaccttaaagggcattgatcgagatggcataagctcttctctttcccttccccatggttataactgtccctgttggcttccttcctgtctgttaggtgcagcatgccagcaagcagatcactgcagataagcaatacaaaggcattatagactgcgtggtccgtattcccaaggagcagggagttctgtccttctggcgcggtaacctggccaatgtcatcagatacttccccacccaggctcttaacttcgccttcaaagataaatacaagcagatcttcctgggtggtgtggacaagagaacccagttttggctctactttgcagggaatctggcatcgggtggtgccgcaggggccacatccctgtgttttgtgtaccctcttgattttgcccgtacccgtctagcagctgatgtgggtaaagctggagctgaaagggaattccgaggcctcggtgactgcctggttaagatctacaaatctgatgggattaagggcctgtaccaaggctttaacgtgtctgtgcagggtattatcatctaccgagccgcctacttcggtatctatgacactgcaaagggtaagtttgctgtgggctttaacgttgtgttcttaggagacagtttaaaagagcattgtaccaacctaacagtccaagagctaaagagttgtttttttaattgctaaaggaagccaagatcatccaatgcaacccttgtgtacagatgacgtgtttaggggatgtggggaaaggaagtcagtaaaactctgctttttggtaaaagcatctctttcctattcccaggaatgcttccggatcccaagaacactcacatcgtcatcagctggatgatcgcacagactgtcactgctgttgccgggttgacttcctatccatttgacactgttcgccgccgcatgatgatgcagtcagggcgcaaaggaagtaagttccacttgagcagaagataaagttgtagtcgtggggcaatctgctgccacaaactggtgatacatacctttaaaatggctgtctgtccaagtcaagggatggggttgatagcatctgtgtctgttccacaactgcctttgagctggcccttcagatgcctatgaatgagggtgcttaaatggtgttagaggttaagaccaatgggtagtctgtattcctgtggtcatagcattaatatttcagtgttgcccatgctaatgtgtgaatgttggatttaaagctgacgttcttagaggtggggctctgctttatttagcctagtgaatcttaggatttttcatcggccttcagtcactaactccatgtctttattctttgcagctgacatcatgtacacaggcacgcttgactgctggcggaagattgctcgtgatgaaggaggcaaagcttttttcaagggtgcatggtccaatgttctcagaggcatgggtggtgcttttgtgcttgtcttgtatgatgaaatcaagaagtacacataagttatttcctaggatttttccccctgtgaacaggcatgttgtattatataacatatcttgagcattcttgacagactcctggctgtcagtttctcagtggcaactatttactggttgaaaatgggaagcaataatattcatctgaccagttttctcttaaagccatttccatgatgatgatgatgggactcaattgtattttttatttcagtcactcctgataaataacaaatttggagaaataaaaatatctaaaataaattttgtctgcagtatattttcatataaaaatgcatatttgagtgctacattcgaataaatactacctttttagtgaatgctacatttttaataaatgctacagtatctccggagatgaagaactgtctttttaaaaccaattgtcagcagtccgcttaacagaataacttggttgtgccacccacaaacatttccaacacattagcaaaggaattcaggcccagtgcatccaaaaaacattgttccattgcctatggatgatcatagctgaatgagctttctccaagaaatactgtgaacccaccttctctagtcctatggttattaatcatgagccatgagctgaattatccactttaaaatggttacgtttgttgcatgaatatcacctcatttaaacttttagaatcaataccaatttcatccagttgccttcattttcacctggctcaagccattttttttttttttttttttttttttttgagacaagagtcttgctctgttgccaggctggagtgcaatggtgcaatcttggctcactgcagcctccgcctcctgggttcaagcgattctcctgcttcagcctcccaagtagctgggactacaggtgtgtaccaccaagcctggctaatttttgtatttttagtagagacagtttcaccatgttggccaggatggtctagatctcttgacctcatgatccacccacctcggcctcccaaagtgctaggattataggcgtgagccactgtgcctggccagctagagcaattttttaaaatttatttatttattatctatcttttgagatggagtttctctttttttttttttttttttttttgagacagagtcttgctctgttgcccaggctggagtgcagtggcacgatctcggctcactgcaacctccgcctcccaggttcacgccattctcctgcctcagcctcccgagtagctgggactacgggtgcccgccaccacgcccggctaatattttttgtatttttagtagagacggggtttcaccgtgttagccaggatgatcttgatctgacgttgtgatctgcctgccttggcctcccaaagtgctgggattacaggcgtgagccaccgtgcctggccgagatggagtttctctctttcgcccaggctggagtgcaatgacacaatcttggctcactgcaacctcccccttccagtttcaagcgattctgcctcagccttttgagtaactgggattacaggcgcctctcaccatgccgggctaatttttgtatttttagtagagacggggtttcaccatgttggccaggctggtctcgaactcctaacctcatgatctgcccatttcggcctcccaaagtactgagattacagatgtgagtcaccacgcctggcctcaagccatttttaattccattcagagtagaggattagagctggcacagttacatagtgctgagattgcagtgctgttaaagattatgaagagggccagacattggccacgacctcaaaactaaccttacaaagaggaaatagcatctgccttttgcttcatgctaataagcccagtcaatggagggcatttatgtttattttcaataaacccttatttggaatccatgtgacagtgtttggactttctgtatctcttgattagggctcaaatccagtggattttgccatgagatttgtactaagaatgcagcattatgtctgtcaagccacaactttaaaaatgatagaacgggtgctccatgtgtacatgtaaagctcattcttgaggaatatcccacacactggcatgtataagagctattcacagagaggtctgcatggcatggatgaatgcccaaggatcccagagtttatgtttgtcctctggccaggcacctgaatcgtagtatagcttagttattaagaattctgttctggtatcaaagaggcctgggctgaagttctggactctgatgttcagttgtgttaggccaagttacttaatttttctaaaccttggttttccttatctgtaaaatgaggctattaataatgcctgcctcagagggttgttgcaaagattaaataatttatgccaagcatctaccatagaacataataagcattacataaatggtgactgacagttcttaggaggcagatttcaggggctctagaatcaatcagacatacctggattttaatcctggctctgctgattactgtgtgactttgggcaagtcacttaatccccgggagcctcagtttcctcgtctgtgaagtggggatataatagcgcttatatatttctttccttccttttttttttttttttttttttgacacggagtctcactctgtcgcccattcagagtagaggattagagctggtacagttacatagtgctgagattgcagtgctgttaaagactatgaaatctttaacagctggaatgcagtggtgcgagctcggctcactgcaacctccgcctcccaggttcaagcaattctcctgcctcagcctcccaagtagctgggattacaggcatgcaccaccatacctggttaatttttgtatttttagtagagatgggttttcgtcatgttagccaggctggtctcaaactcctgacctcaggtgatctgcctgccttggcctcccaaagtgctgggattacaggcgtgagccacctctcctggactgctcatatatttcttaggggtgttgtgagtgagggttaagcataagaaagcatgtagagccagaagtatggtgcctggcatttagcaagcactccgatgtgaactttcacataatacggcacccaggtttgttgagtgaagatttgcccaagtacagcactgcttaagaatgaattcaagctcacctttctttttctgcaacagactagatatactatattgtgtagcatttatacaaaataaacttcaggttagttctttttcagttgtagattttattcttgaaaggggataagaggctctccagtaagggctgcatacacgatgcaagaggagccaagccccctttatggttattacaatagatgtggactcactgagctggcagctattaaaataaacctaggaccaggcattaatgatcagaaagcaagaagtggtgcctcctgcaattgggtagctgacatagatgaggtgggggttttttttgttgttgttctttctattcttgttcaatgatttttgaaatttaatttaaagacaaagtggttttaatctctccaagctgtgcaggatagtgctatagaattcattatgtccattacgctcatgcgaacgttgatggtacacaatcttagcaacaccctaatttatgccgttgttttgttactattcaatacataacaggatccgtgaagcctgattccaggtgagagagccagaacacaggtcagcttgtgcacagccgtgcttcctattccaagggccctctgcactcagtgactggaagcagcgcgctacgggcgctccggaccgccggagaaagaaacgaggggtgtcttcccagagcggcagttttcgtgaatggtaagtcatttaaaccgtcatttttttgtatcaaaagagatgcagagatgctagagagtctattaatttgaaggcattttaaaaacataaactgcaaagagagttttggtatacaagggccatttctggcactgcccccagactccaattcagtctcctctatcattacagatactttgggagaaaaaatttttaaagtactgctgtactgtatcatagattttcaagcatccgtgttactggggtaaattctatttctcctttgaagtttgtgaacgtagtatttctaatttgcttttgaggtttttaatagttaacatctgtacatggtaataaaagccaaatagtaaagaaaatatgtaaaacgaaaagtaaacatcttcctgtcctgcgtttctcatcactagccccctcctcaaaagtcaccgttattagcaatttcttggctatccattcccccaaaattaatgcatattgctgtaacggctgctgatttgttttatcggaatcgtattctgaccacctggattcaaaatggcatgattcttttagaaccgagtcatactgtggagtaccaggactaacagaagctgtcggaggcaggagggcagggaaagggtagcttccggactctgagcaaggatttctaagtgtggccatttattaaaatcctaacctgggatttttttttttttttttttttttttttttttttgcgggggttggggggttagttttggttgctgagtgacctggagacaagtcacttctaacatcagggtcttagtttcttatccttgaatggagaaatttggggaagagacaaactctaaagtcccttctagtttagacgtcctccagctccatcatttttgcagaaagcagaaccagtgaaaggaccaggattaggtgatttaatcctttcagagaacattttaaaatatctaacacaatcgtaaatgaatagtctctgactcagagcagtcatttacagactgtgtgggtggtttgccattggcaagtaaaattacgaatgtaaagatttacattaatttcaggaccaagaagctgagcaacaaattacagctcggtgtttgggtcagaggtgctctgatttacctcaaaataattaacatctgtcttctcaaagcctcatcttattatgtgtaatgtgcacttccgtatgcaggttgagatttatttgaacaacaaatattaggcgctgcaatttcggacacaaaaatgccttgtgttccactccaaatgtttggaggagctttcctatcatttcagccattatttgctttatgtgcaggtgaacaaggtcagatgcatggtgctcttcttagccaaaggcttaagagagcctttggtatcccggcaacaaatataaacagtattcaagcgacagattgggcagttgctttcactagaccctcatcagagacaaaactgagttaaattaaaggagtctattaatccttggcttttccgtgactatcagggaaggggacagagaaacgagggggttatttttatggcgagcatccatcctgggatttcatttccttgggcaactttcgtaacatggggaggcaatttagcactgttgagattttagagaacatgccgaatctgatcacatgacatgttacactgtctctaatgttttcagtcccagaatagagatggttatggttgcaaggacataaccagaataaagtatcagttaaatagctgttgactggtaacttccgagggcctcgtgtttgggaatgaaaaggaaaactcttctgtctaaatgaactccaatacccagtttggcaagaagcagagatatcttatgggcagaggcaaaggcagatgtactgtggagctaggggtgcttcccctttggagccaccccttgcatgggcccctcccaagccctaaccatatattcatttggtcatatggtttggcaacattttcaaaagacatattttgtgtttttaaaaagagggagccaaatcatataagctgacacttccacaaaactcagatccattcctgcccgtggaactggagtggatgaaggaatttggaggcagccctgtacatcagggagaggtctggggcttcctcaccacctgaccttcctcggagcacaccgctcaggactcactcatgagaagctttgaggctagaggtctcattttcaaataccaaactttcttacttgacaacaattcaacttttacttaactgttttgtgccttagtttccccatgtggaatatggggataactttagtacctacctcataggaatagtgtgaagattaaaggagttaatatatgtaaagtgcttagaacaatgctgggcacctgctttacacaattttgctcttattatgactgttattgctttgtttttgtttttgagatagagtcttgctctgtcacccaggctggagttcagtggtgcgaacttggctcactgcaacctccaccccccaggttcaagcgattctcctgccttagtctcccgagtagctgggacaagaggtgcaagccaccacacctggctaatttttgtatttttagtagagatggggtttcaccatgttggccaggttggtctcgaactcctggcctcaagtgatccaaccgcctcagcctcccaaagtgctgggattacaggcaggagccactgcatctggcccgactgttattgttttattgaaatgctttaaattattttcacttcattcatgggagaatggtttaatggatttatccttttcctgcagattttctaaaacagtctcaagaaaatgctatatatactatagaaagtggatcacacacacacacacagagagagagagagaaggttgtaaagaaagaaaaggacatttttggaatggactgaatgaatagaaacatgtgcttatggtgataatcctgagctctaactcagagcacttattttacaacactgattatgaaagagaccaaaggtcaaagataaatccgtcctgcctcacaaccagactgcactgctcacctgacccaggggccactgtgtggtcaccaggattcttctcacagcttcctttgctctcgtagtatttcaaggaacccatgaggtcccagcctgattacccaaccctatgacttcactccctagggaaagaagctgcagggaggagaaaatttactgagacctttagaagcaaaggatctcctttcactttcacaactaagtccagggttcaggagtccatttattacaaaaattgagcttcataatggctttatcccagaagtgaagatcagggggtaaggacgcttgggcttctgggtaaaagcgtgctgtttgccaattagggtagaaagctaggagtttgaccactgaaattgtaatcccacttcggctccatgtttctttgtcttgggtcatatcacatcccgtcactagttagtggctcagtttgtctaccaggaaacctggaaatcaactttcctttttaagctacaatataattcctcaaatctactgtgggctgtggttctttttggagtttctagggctagatagattgaattaagttaagcctgcgtcttcaggttaaacaatcgatacaaccaggtaacagtaatttctctaaaactacagaatcaagatcatagctcattattttgacatcttatatgccagatgttgtgctaagcactttacatggattaactgtccctattgtctcaacagccctaagaggcaggtattattattcactccatttcacagctatgaaaccgaagcttagagagatgagataatgtcctctgagctatctgactcggcaaaaggtttcaaagagaacttcaaggtgaccctgtccaactatttattttgggtcatgaactatattaaaatatgaaagccggctagtttcaataccaactgacaaaatccatttgacaaatattaaatagaaattataataacctcagttggataaaaaaagagataacaaaagaaaaaataaattataataaccaaagcactgtttgtaaagtccatttttagagtatgggttattttctattttcagccaatttaagaattatggtcattaaaaactacttgaccctaaagctctagagttaaatttgaatttattcacatttctttggcttttccaagacagatcttccttttaaatgacggctcttcacaaggaatactgagcctctctctaaggttacaagcctgaggctggggtcattaggactttgcgtaaggcccataccaactaacaaccacaggaggagttggtgttggccgcacccttacctctaaccagggttggctctcagaaaaatgcagtgaggctgggcacagtggctcacgcctgtaatcccagcactttgggaagcctaggcgggcagatcacctgaggtcaggagttcgagaccagcctggccaacgtggtgaaaccccgtctttgctaaaaatacaaaaattagctgagtgtggtagcgggcacccgtaatcccagctactcaggaggctgaggcaggagaatcgcttgaacccgggaggcggaggctgcagtgagctgagatcgcaccattgcacttcagcctgggtgacagagtgaaactcagtctcaaaaaaactttgggaggccgaggcaggcagatcacgaggtcaggagatcgagaccatcctggctaacgtggtgaaaccccatctctactaaaaatacaaaaaattagccgggcatggtggcaggtgcctgtagtcccagttacttgggaggctgaggcaggagaatggcgtgaacccaggaggcggagcttgcagcgagctaagattgcgccactgcactccagcctgggcgacagagcgagactccgtctcgagaaaaaaaaagaacaaaagaaaaagaaaaatgcaatgagttgggctttgggctattttatctgattgcaccttatattgagagacagtactgtgcgcctcatgttctgttcctcctcctgcacgtgatctgcagttccacttgccatttcctacctatgtcattcactttcatatttccaagcttggctgtactattgtttttcccagcatgcccttacctgcccctctgccagggcatgatccttcaagacccagctcagattgcaccacctctgggagccttcccagactccacctgcccatactcattgctctctcctctgtacttctaaagtaatctatctctgtcagcttcacaaaggcagatattttgtctgtttcattcatgtgtccccagtgtctagaacagtgcctggcacatagtagatgttcaagaaatagttgttaagtgaatgaattataatgtttatttcatggtatcacaaccaagtatttatttgtctgtcctcattaagggctatgtctcgtttctctttacattcctaaaactgagcatagaacctaacacatagtgaatgtgtggtaaatgtttgctgaaggaggagataaatgagaaaatgggccaagtgcagtggctcacacctgtcatcccaccactttgggaggccgaggcgggtgggtcatttgaggtcaggagtttgagactagcttggccaacatggtgaaacaccgtaactactaaaaatacaaaaaattagctgggtgtggtggcacatgcctgtagtcccagctactcaggaggctgaggccggagaatcgcttgagcccgggaggtggaagttgcagtgagctgagatcgcaccactgcactccagccagggcgacagagactctatctctaaataaataaataaataaataaataaataaataaataaataaataaaatagccaggcacagtggctcatgcctataatcccagcactttgggaggccgaggcagtcgaatcacttgagattgggagtttgagaccagcctggccaacatagtgaaacccaatctctactaaaaatacaaaaattagctaggtgtggtggcgggcactgtagtcccagctactcgggaggctgaggcaggagaatggcttgaacccgggaggtgtaggttgcagtgagccgagatcgagccattgcactccagcctgggtgacagagagagaccctgtctcaaaaataaataaataaatatctgtataacgaaataaatagagaatgaatgaatggcatgttgtagggtttgtgcattggttattgattggcatgaatgaattttggctcgatccagccacttgatacctgggaacaattctgtagcaataaatgtacagggcctttctttttcattttcttacataataattcagcaaatgtccggggccttttgacttgcagctattgtttttccagaccctgggcttacagggaagatctggatattgcaggggttgggaaatcaactggttcctgtactgctgctatgttgtccatgctagagaaccagagaggcgggaccttggcacacacccctcccctcctgaaatctgtgtgaaaaacagctgactccacatccagggcttctaccatactgtgttcatgggatgctggcctgtgccacacatgtgctggccatcttgtcatgagcccctaacacagagccctccacatagtaattgcctgatggatgtctggttgtgatgatgacaatattgaacagtggctgtcacacaacatgactcaggccactccaaggggagaggaacagacatgttcctggggcacctgaggacgctgccgatagagctgtgccaactgcacgcccatgtgactgattagggctgattaggccagacctgctcccagacctgggcctaatgttcccagcttctaagactatttcagccactaaaagcccatgagaacccttgagtgaatgtggccctttttgacgtgctcaggaagcaggcagagtttgttctctctcacttgtgagtgggaggcctccaggagtgcagcagcggacttgctcagtagtaacatccattgtcatttcttgagctttgactatgggccaggcactcttttaattgtggatactcatttaatcctttcagtggccttatgatgcaggtgctaagattaccatttcccagatgaggaaaccgaggcacctggcaaaccacgtgtaacacctgcagatgaaaaccctgaaaacaaagggaacccccccccaacttagagagagtcagaaagtagcacttaatgctgcggtgcctggaaaataaccacggaggcccagaggaagggaggggttcaagctctttagggaccatcggcctgcttggggacctacccatgtgaggagcccctggagaggcgcttggtgcagtggttaagagcatggttccgcccctttccagctgtgaaatggtgagcaagattctaagtctcactgcctcaccttgctcagccggaaaatggggtcaagaacactacttgcctggcactgtagtgaggatgaaataaattaatatttgcgaggcgcttggcacaaagcctagcatataatatgcgcttaagtgtttgttaaataactacgggctctctcagagtcggccccttccctttaggcgccggttttgtaatctgggaaactttgtaaagagcgctctcagcgcggtggctaaaacagtccgctaggactatgccgagtagcagcagaaggaaatggcccggcccgccaggcggggagctgcagacaactaggagagaggagggcagggcacgccctgagggaaaaaacgcggcttttgcaggcctaatggcggttgaaagtcgccgaagtgcaaggctggattgagacagacaggctgaaaaagtcgcagcgcagccgcagcggcagcagccgatggccgactccttccttttccagtccacgtgcccaggcgggtctccggccgcctctcgcacctgcctgcagagggcgcgctgcttctcgcctcggcctgggcaccgcggccgactccgctggaagagctgtgtcctccacgcagaccgctttccaccaagctcagctaaacccaccgcccccaagaagtctaccctggccgctccagccaagctcttcctcccctgaacccccaaagcatcatcagcactgcataatttagaacttggatatgtgctggctggtcactgtgtcctacgtatgggacaaatcttggctcaacaatatcatactttgcatttctcccccgagtcacacacggccattggcataccggcagccacatagcgtgtgcccagcaaacacctggtgtacctctactgggtctcactgtattggctcccaaaggagactctcaggatccctgatgtcgccaagccctggggtggcagaagggacacctgggaggatgcctgcatggcctcagttgccacttcgagccttcactgaccaaatgaggtcggtgtagcccacctcagaaggcaatgccttcgtgcaaaggaaaccctctgccagggaatccattgatatggaaatatttgctgagccccagctttggtgcagagccctgtgctgggcaccagggacacagtgaggaatagaaaggattcttgtggtgatgggaggcagtgtagaaaaattagaatagcaagagatttaaagtcaggctgggcgcggtggctcacgccggtaatcccaacactttgggaggccaaggtgggtggattatttgaggtctggagttcgagaccagcttgaccaacaaggtaaaatcctgtctctactaaaaaaaaaaaaaaaaaaaaaaaaattagcagggcgtggtggcgcatgcctgtagtctcagctacttgggaggctgaggcaggagaattgcttgaaccccgggaagtggaggttgcagtaagccaagattgcaccactgcactccagcctgggcgactgagtgagactccgtctcaaaaaagaaaaaaaacagagagagatttagaatcagaaaatcccccacaggcactagctgtgtggccttgggcacaccatgtcacttctttgagtctcagtttcctcttctgtatctctgagggagtctggagtagggtagcggtggtcagatctacaatgatagccagatttataatgttttaatgttcatgagaacatacttatccatgaagtaagtaatttaaattacatttttaacagtacacattttttttttttttttttagatagaatctcgctctgttgcccaggctggagtgcagtggtgccatctcggctcactgcaacctccaccttctgggttcaagcgattctccagcctcagcctcatgagtagctgggattacaggcgctcaccaccacacccagctaattttgtatttttagtagagatggggtttcaccaggttggccaggatggcctcgaactcctgacctcaagtgatccacctacctcagcctcccaaagtgctgggattacaggcatgagccactgcacccagctttattccttcgatttagctgtaactttgtaaccaacctctccctatcctcccctcccctctacctttcccagcctctaataatcataattctactctctacttctatgagctcaggagttttttttagctcccacatataagtgagaacatgcagaacatgcctgacttatttcacttaacataatgtcctccaggctcatccatcttgtcatgaatgacaagatctcattcttttttatggctgaataatattctgctgtgtctgtgtgacattttctctatccattcatccattgatggacactaagatagattccatatcttagctattgtaaatagtgctgcaataaacatggggaggcaggtatctcaatacactgatttcctttttgggggtatatatccagtagtgagtggaattgctggatcatatggtagtcctatttgtagtttgtttttttttttttaagaaaccttcataccattttccataatggctgtactgatttacattctcatcaacaatgtacaagtccccttttctctgcatcctccctagcatttttttttttttgtctttttgacaatagctattctagctggggtatacattatatttttttaaattgaagcataaaatggaagtgatggtgttttgtgaaaaccaaatgataaaatagttatgaaagctgttgtaactgaaagaggcaccacaaagtttcattatgtttaccactgctaaaatatataggaggcacccagttaatgtttcttgaggagaatggaaatgtttcctgagtgataggatccatatataaacatgagagttaagagtgccagaacatctgacatgtgccaaatgcgctgtccagatgataagtatttaatggattctcttagagagcaatcactgggcggggtggtcagggctgcatggtggaggtgagatttcagttgggccctgatgatggcgttgatctttggtgaagaggcatgaggaagacaatccagacagagggaagggcatgcactaagggcacaaaagcaggaaggtatgaatgatcgagaatgccaagtgcaggagggcagggccctctgcctctgctctagcctcagtgcctagcacagtccctgacacatagtaggctctcaatacatgtttgtggaaggaagggagggagggaggaaagaaggaaggaagagaggaaggaaggaaggaaggaaggaaaggaaaggaagggcggaagggtgggccaggtgtggtggcttaccactataatcccagcattttgggaggccaagatgcgaggatcacttgagcataggaatttgagaccagcctggccgacacggtgaaaccctgtctctactaaaaatgcaaaaattagctgggtatggtggtgggtgcctgtaatctcagctactcgggaggctgaggcaggagagtcgcttgaacccaggaggtggaggatgcagtgagctgagatcacaccactgcaccccagcctgggcgacagagggaaactccatctcaaaaaaacaaacaacagcagcagcaacaacaaaaattagctgggcgtggtggtgcatgcctgtagtcccagctactcaagaggctgagacaggagaatcgcttgaacccaggaggtggaagttgcagtgagccgagatcgcaccactgcacaccagcctgggcgacagagcaagactccctctccaaaaaaacagattacatgatacaatgtgagtaaagagcctgctgcaaccctcaaggacaattggtggccattgtgatcacaccccttaggctgaagcagatttcggaggagtgctttgcatacagtaggtcatcagctaatacgggttgactgagaggaagtttggggccttgaaccttttatccgtgtaggcaatggggagcttcgcacacaaagtagggtgggtgttggacgatgaacacagatgtggacaatgggttagacaatcaacacagatgtggtgtgaggtgtgggttgaagtggaggaggaggagacacaggtatcgcagttgttgcaacagcaaagggattagtgacaggctagggtgatggcaatggggatgaaaggacaggtagggcagagaaagcaaataacagaacttgttttttgttgttgtttttgagacagagtctcgttctgttgcccaggctggagtgcaatggcgcagtcttggctcactgcaacctctgcctcctgggttcaagcgattctcctgcctcagcctcttgatgtgtccggaattggtgggttcttggtctcactgacttcaagaatgaagccgcagaccctcgcggtgagtgttacagctcttaaggtggcgcgtctggagtctgtcccttctgatgctcagatgtgttcgaagttttatccttctggtgggttcgtggtctcgctggctcaggagtgaagctgcagactctcgcggtgactgttacagctcttaaggcagcgcgtctggagttgtttgctcctcctggtagcctcgtggtctcactgggctcaggagtgaagctgcagatctttacagtgagtgttacagctcataaaaacagtgtgcacccagagtaagcaataacaggatttattgcaaagagcgaaaaaacaaaccttccacaccatggaaggagaccggagcgggttgccaatgctggctgggcagcctgcttttattctcttatctggcccccacccacatcctgctgattggtagagcccagtggcctgttttgtcagggcactgattggtgcgtttacaatccctgagctagatacaaaggttctccaggtccccatcagattagttagatacagagtttggacacacaggttctccaaggccccaccagagcagctagatacagagtgtcaattggtgcattcacaaaccttgagctaaacacagggtgctgattggtgtgtttacaaaccttgagctagatacagagtgccgattggtgtatttacaatccctgagctagacataaaggttctccaaggccccaccagagcagctagctacagagtgtcgattggtgcactcacaaaccttgaactaaacacagagtgctgattggtgtatttacaatccctgagctagacataaagattctccactgtccccaccagagcagctagatacagagtgttgattggtgcactcacaaaccttgagctaaacacagggtgctgattggtgtatttgcaatccctgagctagacataaaggttcttcaaggccccaccagagcagctagatacagagtgtggattggtgcactcacaaaccttgagctaaacacagggtgctgattggtgtatttacaatccctgagcgagacataaagacgtccccaccagactcaggagcccaactggtttcacctagtggatcccacactggggctgcaggtggagctgcctgccagtcccgcgccgtgcgcccgcagtcctcagcccttgggtggtcgatgggactgggcgccgtggagcagggtgtggtgctcgttggggaggcttgggccgcacaggagcccatggagtgggtgggaggctcaggcatggagagctgcaggtcccgagccctgccctacgggaagacagctaaggctcggtgagaaatcgagcgcagtgccggtgggccggcactgctgggggacccagtacactctccgcagccactggcccgggtgctaagtccctcattccccagggccggcagggctggccggctgctccgagtgcggggcccgccaagcccacgcccacccggaactccagctggcccgcaagcgcctcatgcatccccggttcctgctcgcgcctctccctccacacctccctgcaagctgagggagccggctctgcccttggccagcccagaaaggggctcccacaatgcagtggtgggctgaagggctcctcaagtgccgccaaagtgggagcccaggcagaggaggcgccgagagcgagcgagggctgtgaggactgccagcacgctgtcacctctcactgagtagctgggattcgattacaggtgcgtgccaccacacccggctaatttttgtatttttagtacagatggggtttcaccatgttggtcaggcaggtctggtactgctgacctcgtgacccacccgcctcggcctcccaaagtgctgggattacaggcgtgagccaccgtacccggccagaacttatttttgaaaggaaactggagagatgactgcaaattagaaaagagaaataggtattaactcagaaagatgcagagacctgctacgtgtgttttactgccaaaaagcacagagctgagcctgtctaccacctcctgtcaaagtgtaaaataacccggaagactcacagggggttctgctggccctggtcagtgaaagttggaatggccagttcccagacgctgcaaattttttgggcaataacattttcccaggaattttagagactgccggattttttttttttttccttctcttccttcaaattgtcaggacagcaccgtccacaagggggcagattatatctggcaaagtccaattacgatggcaatactagtgatattaaaaggcaatctcctggccgggcgctgtggctcatgcctgttatcccagcactttgggagtccaaagtgggcagatcacttgagatcaggagttcaagaccggcctggccaatatggtgaaaccccatctctactaaaaatagaaaaattagccgggtgtggtggcaggcgcctgtaatcccagctactcgggaggctgaggcagaagaatggcttgaacccgagagaatggcttgaacccgggaggcggaggttgcagtgagccgagatcgttccattgcactctagcctgggcgtcgcagcgagactccatctcagaaaaataaaaaataaaggcaatctcccctcataggtgcttcagctatctgaacaagcacaaagaggatatcaatgccatccatttcccctgccctattagcaggagctgcaacgtcagaggtgtgcgtgttgccatatggcaatgaggcgagctctgggaagccaaagagcccttacccgactacaggggacattggttattggccaaacttgacacttcctcctgcttctagctcctggacacctcaccattttcatctccctaacagggccaggaaacagcagagtgtgaggcccagtgggcctgatggtgctaggaagacccctgcaaactgagatcagttgggcaagtgcccactgcaagctgagcccaggattgggtgtggggaggtggaaatccaggagaaatcaaagactccttcaccaaacccaatctgatggaagagaaaaggcaagcccacattggttcagagatcacagagacctgggttcagatctcgatcccatcacttcttagcactatgtcataagtcaggctgctgaacttcctgaacctcagttacctcatctgtaaaatggggagggcaaaaacagtatccacctcacagggtggttgtggggtttcagtgagatattgcataaatgagatagagcctggctcacaggtagtgctcagtaaatggtagctggaatccatgttattgttccagtaacaataaagcaatgtggtaccattgactatactgagtacagaaaaaccttggaagacacaagtggcaggtgagtagaaagtgggtttttccctgactgattgaaggtgaaggggcaggaggtgtgagaacggagcagggagggcattccagaaagagggaaagacaggatgtcttcagggctggtcccatgggtctgcatcggcaaggatggaggctgctgtgatggggctgagtggtttcaggcccagcccagccaggtacaggcagctgctcagctccccgactgtgcattaagaagtcagtgaaaaagtcatatgaggggctgggtgcggtggctcacgcctgtaatcccagcacttcggaggccaaggctggcgtatcgcctgaagtcaggagttcaagacaagcctggccaacatggtgaaactccatctctacaaaaaatacaaaaattagctgggcatggtggcaggtgcctgtaatcccagctacttgggaggcagaggcaggagaattgcttgaacccgggaggtgtaggttgcagtgagccgagatcatgacactgcacttcagcttgggtgacagagcgagactcggtctcaaaaacaaaagtaaaaacaaagaagtaatatgagggaaagagtgtctcggatgattgttagagaagtctcttggtctccagccacagcattttagaagaggaaggcaaatctatgacagcaagctaaggaagatgaggcccaatctccctctgcaggtgcagagaagccaataatatgggataagcgactctggaagtttctttcttctgggcctgaacatatgtctagaattccaagaacatgacccgatgggacccagaagccagcccacaaaaccctcagctatcaactacaaaatgctcatcccgggcatttgtccccccaccacccccaaactccccaccccagggacagtaaactggaaggctattcttgacatttctgatctcagagcccggtctaaggttttcatttccatgctgggttttgtttttttgtttgtttgtttgtttagacagagtcttgctctgtcacccaggccagagtgcagtggcgctatctcagctcactacaacctcaacctcccgggttcaagcgattctcctgctcccaagtagctgggactacaggcacacacaaccatacccagctacatttttgtatttttagtagagacagggttttgccatgttggccaggctggtctcgaactcctgacctcaagtgatctgcccacctcagcttcccaaagtgttgggattacaggtgtgtgccaccgcacctggcccatcctggttctataagtttaacttcccccgtgagtagatctttttagggcgctgacagagccagcagagctgggctcatttcctgtttgcccagatgctaagcttccatataacccttggttacacaggcccttggaaggaagccttggcctaaatagccccaaacaagtgataatagaaaagccttttatatttagcttttggatattgtaagtgatttttggcagcatatttctcttcctaaatagagctggattgggctaattaaaattaactttatgggatgcagaataggagagtggttaagagcctttatagaccagtggtatgggcgctcagccacacagtctggttttcagtccaatcaccaccatttgctagctgtttatctccctgagtttcttcatctgcaaaacacagatatagccagaatacctttctcattgggtatctgtgaggattgcatgaagactaatacatataacacagcctgatgtctggcccctggaagcattcaataaagggtggcagtcatagttatcatgacattatttccctagtagacccactgggctttggataaaggaagtctaaaggtagcctgggggaggggtatatgagggaaaatcaggccaggattaaaaactgtcagcataggcccggcacggtagctctcatctgtaatcgtaccactttgggaggcagaggcaggtggatcagttgaggtcagcagtttgagactagcctggccaacatggcaaaaccctgtctctactaaaaaatacacaaattagccaaatgttgtggcaggtgcctgtagtcccagctacttgggaggctgaggcagaagaattgtttgaacccgggaggcaaaggttgccgtgagccaagatcgtgcctgggtgacagagtgagactctgtctcgcaataaataaataaatacatacataataataataaattgtcagcctataatccagaaaaaaacaatccacctgtggataatcgagttatccacttcttattctttttttttttttttttgaaacagggtctcactgttgcccaggctagagtgcagtggtgtgatcagagctcactgcggtgttgaactcctggcctcaagtgatcctcctgcctcagtttcccaaagtgttgggattacaggagtgagccaccactcaacggccagaacgtgatttcttgaccctttttctcaggattgtgctagctcctcagcaggtttaggctagagtgagcaggtggcattgccccaagaccagttggatgcagagtctgtcaggaatcacttctctatgcaagggagtaggtctggctaggcacaggtatgtgcttgcaaggtaaatagttgttactgacacagtcacctttgtctgtgaggggaggaggaggccaatgcctatggaaggacaaaactccttcagccttaggcaggtcttacctgcccctgcattcttgtcaggttatatattgctcttgtgatgtgtttggaaaaagacaagaaaacatacttttttttttttcttctagccaggacctctggctagaggtagagggacttcttagacgtcactatcatggctgaagcctcaattctgtcctaagccaggaaaccaaattggtaaatttggtctttttttttttttgacagggtctcactcctgtctcccaggctggagtgcagtggcacaatctcaactcactgcagcctcgatagcccaggctcaagtgatcctcccacctcagcccctcaagtagctggaattacaggcatgagctaccacggccggctaatttttgtatttttagtagagacagggtttctccatgttggccaggctggtctcgaactcctgacctcaggcgatctgccggcctgggcctccaaagtgctgggattacaggcgtgagccatcatgcctgggctagtaaattcagtctttatatcatggttcctccattgttgtcaataactctagcactgtgaacatgcttttgtgagctgatgctgctatttacttctctatttacacatttacgtatttgtgtctccctgataccacatttatcttttgaatgggtaatatattggtaatatatcctcggataccaaattgacaaggtataaagggtttacagtaacaagttagtttccctcccacccctgttccctcgccacccacaggtaatctccatgaccacattctggtgttaccttccagagataagctatgcctatccaggcatctattattttaggtggtagcattcttactcatatttgtatcccagtgcgtagaggagtgccaaacaaaagtatgctgtcaaaaaaagcttgttggttgcatgtttgttgctccagatttgttgccctcatcccagccatgggtgcctgaactctctagttgaaattttcatgagcttatcaaaattttacctggggccaagcgcggtggctcatgcctctaatcccagcactttgggaggccgaggcaggcggatcacgaggtcaggagttcgagactagcctggccaacatggtgaaacctcgtctctactaaaattacaaaaaaaattagctgggcgttgtggcgggtgcctgtaatcccagctacttgagaggctgaggcaaggagaatcgcttgaagctgggaggcagaggttacagtgagctgagattgcgccattgcactccagcccaggcaagagtgtgagactccgtctcaaaaaaaaaaaaaaaatttttttttttttttttttacctgtttggacttgcagctctggctttattttctccagactgaaatttacaaagaagctactggggccttgcctaatataaacaagttattctccttcacaatagaactctaaagagcaccctgatgcatgaattttcttccctgctctgttcagtgtaaaacagaagcttagccccagctcctctttgttaggtgactgttccctgaggcaagggttaaagagactttgatgctgctcatcttaggggagtctctaagcatactcatctcagaattctggctcaggaaataaaatgcaggagtttccactgcagtattcctcagtccttgacagagctgggttttccagaagcatccagacagcagtgccaccttcatattctctcatattctctctctctctctctctctcacacacacacacacacacacattttttttctccctgatgtggctaggggacaggctggactcctgcacttgatccatataaaagaacctaaggaagaaagaaaaagggaggagtaagagggccactccctgtcctgttctatgatcacgaggcttgtaaactcaaggaggcagcagggcagagtgccgaagcaaacagaggctgcctgggctggaatcctgactctgccatttatcgcctgtgtgactttgaaaccacctttgcaaaattataactgaggaagttatgatagtgaaagaaaacagacctaaccgattccatcttgcttctaacctttaagctgtccttgttcattcctgggcataggccgaactctccattgcaattcccctgtcttgataaatcgtctctatctaggcagtgagcaaggtgaacccactgggtggttacaactttggacaagttatttaacctctgtctgcttccatttcttccaccgtaaaatggggataactgtacctactttaaaagacttgttatgaggattcagtgagttaacagattgcaatgcatttagaacggtgcctgggcatgtggtaagtgcaatatacatgctatttatttatttattgtttttattttattttatttttgagacggagtctcactctgtggcccagggtggagtgcaatggcgcgatctcggctcactgcaacctctacctcctgggttcaagcaattctcctgcctcaccccccaagtagctgggactacaggtgcccaccaccatgcccagctaatttttgcatttttagtaggcacagggtttcaccatgttggccaagctgacctcaaactcctgacctcaggtgatctacctgtcttggccccctaaattgctgggattacaggcgtgagccactgcaccccgcctatacatgctttttaaacaaaaagaaaaacgtccatgtcagtggttcccgtgttcgatgcatgtccctctattccctggctgtaagtttcaaggttttcacttaccgatcttgggccctttggtgcattttttttcctattgggaaaaagctaaatgttgtgttgtatggtgcatttcttacacagaaaggaaaaactaaaaaatagcctgtatctaggctaaaattcctgtatagaggcaagattgtgtcatctaaagttcttactacattgactttttcctgatgctgttcttggggcccccactctgcctctagagggctggtaagagtccacaggagagcttcccaagccagtgccttttaggaagagttgctgtggctactgagctgatcaaaggtctcagcctccacaaagaagcatgtgctgctgtggcaatgggcctgagggtacgggggccccagggttgcagggcaagacaacaatccggaatccagctgttgtctcggccatcatctgaggtcatcctgccagattggcaggctgtgccctagaccacagaggtagcccctgctcttcaaagggctggattgtcagcccagcccctcctaggccttctcttcaggcttcttctttctacattatcccaacacaaacagcttgacttccaagtgacattgcaccagaaagacttccaaagtcagctcacctatcctagggatctagcccggccaggggctcctatgagggattccataggaggagtcagagactgtcatctaggaaggcttcagagcttcaggataggtcctgggcaacccttgatcgccctcagagactcactcaggttttggcgtccctcggttacagaaaccctcatgaccctaatcacattgcaactgcatttccttcctgtgcctcgggctcagtcagggttgggcccaggtgtgccagaacagcaggcgttcaaaaagcacatcgcttgcttctcagatcttgctcacaaacagttttgtgcagttctatggaaaggaaaaaaaaaaagtgtacccttaacaaccaatatacacatacagactcattcagtgaacatttgttgagtgtctgttatgaacaaggtcctgtaccaagtaccaaggggaggggaagaggatgcaaagttgacttaagcatagtcctttcccttaaggactttgtcctctgccagagaagccagtcacacatatataaatggaattagtttattagtttaataaagtggaattaaaacaagctgtaacataagaccaaactatttattgacttgacatttgctgaacagatattgtgggccaggcactgtactaggagcaagggatacacagcagagaagaagagagaaaaaatcctacccttatggagcttatatcccagtgaaggaggcagagaagtaagaattacaatatagtgtgacaagagtgttaagaggggtcagcagactgagatttgggagcaaagaaggaagaatgtttaactaactgacatttggggaatctggaaacacttccgagagaaagctccatctcggccgggcgcggtggctcacacctgtaatcccagcactttgggaagccgaagtgggcagatcacttgaggccaggagttcgagaccagcctgggcaacatggcaaaaccctgtctctactaaaaatacagaaattagctgggtgtggtggcacacacctgtaatcccagctactcggggagctgaggcaggagaattccttgaacccaggaagcagaggtggcagtgagtcaagatctcactactgcactccagcctggttgacagagcaagattgtgtctcaagaaaaaaaggaagtgccatctcaaccacagctgccatgtggcatggctacagtgtgaatgttgtgcattaccaattgtaacagcccaggctgaaggataaataggagttagccaatagtacttagcaggtgtggagaaccaaaagtggttcaaaatggctagagtgcaagggccatctggcaaatgtggatggagggagcatgagagttggaaacacatcattttgcaaatatcattataaagattggatgggccagatgtggtggctcacgcctgtaatcccaaccctttaggaagcttaggtgggaggatcacttgaggccaggggttcaagaccagcctgggcaacacagcgagaccctgtctctacaaaaaattaagaagataagctgggcacggtggtgcaagcctatagtcttagctactcaggaggctgaggtgggaagatcacttgagaccaggagtttgaggctccagtgagctatgatcgtgccactgcactccatcctggggtacagaatgagaccctgtctcaaaaagaaaaaaatatcggatgaaacacaacatgccaaaatctgtgggatacagtaagagcagtactaagaggaaagtttgtaccaataagcaactatatcaagaaaatataatgatttcaaataaacaacccaacaatgcacctcaaaaaactagaaaagtggctgggcgcagtggctcacacctgtaatcccagtactttgggaggccgagacgggcagatcaggtcaggagattaagaccatcctggctaacgcggtgaaaccccgtctctactaaaaaaaatacaaaaaattagccggacgtggtggcgggcgcctgtagtcccagctacttgggaggctgaggcaggagaatggtgtgaacccgggaggtggagattgcagtgagccgagatcgtgccactgcactccagcctcggcgacagagcgagactctgtctcaaaacaaaacaaaacaaaacaaaacaaaaactagaaaagcaagaacaaaccaaacccaaaattagtagaaggaaagaagtaataaaggccagagcagaaataaatacaattgagacttaaaaaaatatacaagatcaatgaaatgaaaagtcagttttccactaaagaacttatccatgtaaccaaaaaacaacctgtaccccagaaaactactgaagttttttttaagttggtttttgaaaagatttaaagaaacaacaggccggggcgtggtggctcatgcttgtaatccaagcactttgggaggccgaggtgggcggatcacctgaggtcaggagctcgagaccagcctgacccacgtggtgaaaccccatctctactaaaaataaaataaaaataaaaattagccgggcagtagtggtgcgcgcctgtaatcccagctccactcgggaggctgaggcaggagaatcgcttgagcccaggaggtggaggttgcagtgagccaagatcatgccatctaaaaaaaatgctgcgggaatgttctttagaacatttttttcctctcaagtacaggagctactctagggtcaggtattgcatttagcttttttaaaaatctggaacaggatatctctattcttaggaaatatacactgaagtgtagaggtaaaggaccatgatatatacaacttattctcaaatggttcagaaaaagtgtgtgtgtttatagtatgcatataaaatgtatatacataatgtgtatatattatgtgtatgtgtatatgtgtatatatagtgtgtatgtataaaatgtatatacataatatgtgtgtgtatctgtatggagagagaaagagcgagaaagagagagagaacccaaatgataaaggaaatgagataaaatgttaaaagcagatgaatctgggtaaagattatacaagtgttcctcgtgctctttttatttttgcacattttgtaaatttgaatttttttttatttttatttttttgatggagtttcactctgttgcccaggctggagtgcagaggtacaatcttagctcactgcaacctccgcctctcaggttcaagtgatcctcctgccggcatcttttttttttttttttttttggcatttttggtagagacagggttttgccatgtcagccaggctggccttgaactactgagctcaggcaatccacccacctcggcctcccaaagtgctgggattacagacgtgaaccaccgcgcccagcctgaaattacttccaaataaagagttttttaagtataggacaggagcggtggctcacgcctgtagtcccagcactttgggaggccagggcagggggatcacaaggtcaagagatcgagaccatcctggccaacatggtgaaaccccgtctctactaaaaatgcaaaaattagctgggcatggtggcgcacgcctgtagtcccagctactcgggaggctgaggcaggagaattgcatgaacctgggaggcagaggttgaagtgaactgagattgtgccactgcactccagcctggcgatagggtgagactctgtcccaaaataaataaaaataaataaataaaaataaaataaaaaagtatggcaagacagagtaccaaggattggggagggagtggtgagaaatgaaagcagcagctagttcttgaagagacctgctcaccatggtcagaatctggacttcggggcagtaaaaggtatattcccaaaggagtgaaaggagccaggcatggtagctcatgcctgtaatcccagcattttggaaggccgaggtaggaagatctcttgaggccaggagttcaagaccagcctgggcaacatagagagaccccgtctctacaaaaaaaatacaaaaattagccaggtgtggtggcacgcacctgtagtcccagctactctggaagctgaggtgagaggatcgattgagcccaggaagtcaagtttcagtgagccatgatcacgccactgcactccagcctgggcaacagagcaagaccctgtctccaaaaagcaaacacaggacaaaaaacgaaaagggtgtaggggaaggggttgaccttggaggaagtaccaggatagagaaaagatgggcattttgcaggctgagtagaaggatgcatggtggtcatcttcttagctctggttatgtttgagcgacacatcatagtacagatacaaagatgaatgaggcacggtgggctcttctcaagaagtctggtggtgtcacatcctggagaactggttgcggcagtgtcctggagatgtcagaggcggccacagaagggcacgggcttcaatgtcaccttgcaggactggagaggggttggtgcaagctatatcttatagggggctgtctctccagctggcctagaggatgggggttaagaagagacttgagttttgtaagagaaaaagcctccctcagactctgaagacgatcaggatccgcccacccagaggaagaaatgcgtggctctgtcaacttttcaggtcataggtcttgagtgggagaatgggagccctttttcaaccccacccccaaatttcctcttgccagtttctttctccctcctggaaggaagcctggacaccacattctgggagatcataactctccccctgagagctatttgctggctctccccacagaaagaccttgggagggaagcacagtcacctgtcatggcaggagctggcaagctgagacctctcccttccactggccctgccttcttcagggccaggcttcctcatgggctgtcccttcagaacccagcccacaccttttcaggaagccactccccacaaatcccctctggtcctatggacatgcgcattacccttctctgggccttcccctgacttcctcattggtgtcaatttttttttttttttttgagacggagtgttgctcttgttgcccagcctggagtgcagtggcgcgatctcggctcactgcaacctccacttcccaggttcaagcaattctcctgcctcagcctcctgagtagctgggattacaggcatgtgccacaatgcccagctaattttgtatttttagtagagatggggtttcaccatgttggtcagactggtctcaaactcctgacctcaggtattccgcccgctttggcctcccaaagtgctgggattacaggcatgagccaccgcgcccagcctcaaaactttcttctcagttcacattccttcctttctgccaatgccagtagggtgaatcagataacctagagtggtgagctagctaatatggcagtgctgtccccagaaactactggaataagggggaacatcaggcacctacaacctggagagaaagacttgtcaggcaggtctgcttcctgctgccttgggcacttccttcgggactggtttgttgagagggttgagaatggattggaggggggggtggggatagtgggggaactagaggcaggaaagctcatcaggaggccttgctgcacttccacatagatgggggcctgacctgaagtagtgaccgtgcatggagagcgaggttgttgaagtgaaaacgtgaaggctagaacaggcctgacttgatgactaggcctatgggagtgtgagacgagggtgtgcccagatttcctgcttggccaggtaggtgagtggcagtgccacttattgagaaagggatcatcaggcaggacaaactgtgagtttgagggggaaggaaaggatgacaagttgtgttgggtagattcaatttgagttgcctataggatgtgtaagtggggctgtccaggaggcacttggatgggagtgtgtgtgtttcgagcacagaagcaaagtctagtctggaaacaagagtattaattttctctctctcactgtttctctctccttcacacacacacacacgtgtgcgcgcgcacacacacacacacgtgcaaacaccagaactttcaaagctaggtgcactcacagggtcattaagcccaggacatgttgacaagggtgtggaggtgtcatcctcggggacatgcagggagggttcctggacagtgatttttacatcgcctccttaattgtccataaccataaccatgatccatagccataaggacaataggaattgtggtcccccagagatttttttcctactgaaactccatagtcacacctctttgcagactttatggcaggccttcccttttttccaaacccctgtgaatagtgtcagacagcatctgcgggaggatgtgtgtgaatgctgggatgcagggggcatggcagggagtggagcacttgtaattctgttgatgttggagccctcccctttcagagtgcattgagtccttagtgtgtgccccctcgccccgatcaattcccaatccctgtgttgcagagagggcagcaccaccttctcagccgcacaggatattctcaggctgatgccaagagcaaatcactcccagccagcacacttctgccagccttggtaggcacagcgtgtagcagtgcgcatgtgggtggggacagaggtgacttttctcatagactgggagaaaaaaaaaggcatctgaacttcctggttacagaacatccggctagtagaaacctttgtgtgtttgtacgtgtcgggcagggggggattagtgaggttcccctcccctctagtgttagcaataatgaaggacactctttgtacaagacgtcaagatgagagcttccacacaggactccacactgtgcttctgtttcaccaggaagaaatcttgaatgtcagccaggcttgtactcatcaattcattcagccagtctctgagggctggtccttctactgagtgctggctagggtggggctgaggactgtgcccctggagagctgccagcctaggtgcaaacacagaaccttcattcatgcagtgacatcacagcagcccatcacaacactgccccaactgcatcagagcagttgcacctgataggtttcccaggggttacctgaggagcaaagccaagtgcgtgtggcccaaagtagacagcatatagggcctgcacgctgaggactgccccaaatgctggcccagctttttccaccagggagggtcagattccaaagccgacagccactcagcacgaggcccagacccaaattccactgccagccacttctactgctgaaaaggaaatagggccgaaaatgtagacttcaagggcaaacactggatcacccttgggagtagcttccagagctctgagtaacatcctggaggcagaagagaaatgtttgccctgccccccagcccacagtctccagcatcaccagcctttctggaaagccttccgaagtcaatttcagcccagccaggagcagggccaagttgacagagggctgagccagagctcccctgcactcacaccttgatctttctcttcctcttagacttgagtgcttgccaggtgtgcattccagagtcaatgcaagtgtccctggctctcttccaccccttcccaggcaaaaagaggccacccacccatggaaaagccactgttgtcaatctgtcgccagaactctcgctcaaggtggcagtgaggctttggtgccagctagggtttgctttggaatccaggagctcccatcaaaggcggtgggctatggggtcctgaatgaatggcaaaggggcatgggagtagggatgagggtcattcaggacttggaaatatagttggccccgggtatgtgctggagctggctccctctggcccatgagagccagatgctatattttcagaagttttgtgagtcagtcattaagcatagcacttattttaaaatatataaaattacaattaaataaattatattaaaaactaaggtaatcaatgtcccaaaactcatcatctcctaatcattttactttttttttttttttttgagatggagtttcgctcttgttgccaggctgaagtgcaatggcacgatctcagctcaccgcaacctctgcctcccgggttcaagcgattctcctgccttagctttccaagtagctgggattacaggcatgtgccaccacgcccggctaattttttgtagttttagtagagacggggtttctccatgttggtctggctgatctcgaactcccaacctcaggtgatccacccgcctcggcctcccaaagtgctgagattacaggcgtgagccaccgcacccggccttcattttactattacctgtgctcttcagatgatttatgtctacagtatctgtagagttgaaatactgtataatagtgtgcaattgtgtctcttcccaacatcacattgaagttaactgcttgaaatcagccacagtgggaacacttacaactcagaaatcagcaaatgctataaatcaggcttgatctattcttttgttgtctatctagaggaaagaaagcaatagaaacaatgttaataatgcagataaaactcaaaggtgtgccatatctatagctgttagattgtgaataataccaaaaaatgagaaaatagtcttccagagtttgaaaaccactaacctattcagcaaggaaatcagccaggcacggtgtctcacacctgtaatcccagcactttgggaggctgaggctggcagatcacttgaggccaggagttcaagaccagtctggccaacatggccaaaccctgtctctactaaaaatacaaaaattagccaggcgtggtgctgtgcgcctgtaatcccagctactcaggacgctgaggcacgagaatcacctgaacccgggaggcagaggttgcagtgagccaagatcacactcctgcactccagcctgggcaaacagagtgagactccatttaaaaaaaaaaaaaaaaaaagaaatcactcacattgtggacaaatgaatgcagttctgacatcattgtttctcacttaaatgaaaatatcaaccaacatgcacgtcagaactacatttgttcggccgggcgtggcggctcatgcttgtaatcccagcattttgggaggccgaggcgggtggattatttgaggtcaggagttcgagactgggctggccaacatggtgaaactttgtctctactaaacatacaaaaaattagctgggcatggtggtgcacccctgtaatcccagctactcgggaggctgaggcacgagaattgcttgaacctgggaggcagaggttgcagtgagctgagatcatgctactgcactccagcctgggcgacagagtgagactctgtctcaaaataatagtaaagttctaggtaacagtagattaaatgtttatttaatccattcatccaactaatatttattgagcatctactatgtttactgagtgttgattaggtgccgacctgtaatatcagctactcgggaggctgaggcaggagaattacttgaacccaggaggcggaggttgcagtgagccgagatcgtgccactgcactccagcctgggcaacaagagcaaaactctgtctcaaaaaaaaaaaaaaaaaaaagaactacatttgttcatcaagtgcaaccacagatataagagttgggcaacaatcgatgaaagcattctgtgagaatcacttggctatattgaatttacaataaataatattgtatattttattgttatggctaattcgtgtactatatatcctttacataagtaaaatttataattaattagcttatgtacataaacacacaaaaacatacacataccttaccccaccccgagagctggtcgttaaacatttacaaactcaccactggttaagcccaaggttcacaactactttggcaccagaaacacaaggttcaaaggtcccagaggtactccaaccctgaccagaacatgatggaggacagacaacgtggctagaaaacatctatgtgttaaaaaagcaaagcaaacaaaaactttttttttgctctcactaggccataaactccatgaaggtaggaacttcatctctgccattcatagtggtatctttggcacctagtcagctcaatcatttttttttttttttggtgtgttttgctttgttttgtttgagatggagtctccctctgttgcccaggctggagtacagtggcctcatctcagctcaccacaacctctgcctcccggggttgaagcgattctcctgcctcagcctcccgagtagctggggttacaggcatgcgccaccatgcccagctaatttttgtattttttagtagagacgggtttcactatgttggccaggctggtctcgaactcctgacctcgtgatccacctgccttggcctcccaaagtgctgggattacaggcgtgagacaccacacccagccaaaagcccattactgtttttttttttttttttttttgaaacagagtctcactctgttgcccaggctggagtgcagtgacgcgatcctggctcactgcaacctccgcctcccaggttcaatccattctcctgcctcagcctcctgagtaactgggattacaggcgtgcaccaccacgccaagctaatttttttttgtatttttggtagagacggggtttcgccatgttggccaggctggtctccaactcctgggctcacgtgatccacccacctcggcctcccaaagtgctgggattacaggcgtgagccaccatgccgggacagtttttgtttttgtttttgagacagactcccactctgtcacccaggctggagtgcagtggtgcgatctcagctcactgcaacctctgcctcccaggctccaacgatcctcccgcctcagcctcctgagtagctgggactacaggtgctcaccaccacacctggctaatttttgtatttttggtagagacggggtttcaccatgttggccaggctagtctcaaactcctgacctcaagtgatccacccacctcagcctcctgaagtactgggattacaggcgtgagccaccgcactcggcctcaatcagtttttctagaaaaaaatgaatggctcttctatgtcagctaactttggtttgacttctaacatcacccggggatggccttgagtggagagccaggcctgcattcctcagtctagaaatggccctctccacgggttccttgcttccctctcagtccagctcggcaaggactctagttccagcatgcttccttgatgcctgccaggaagagcaactgctttacttcctgaacactggcattgaattaaaacctagctggttccccagaaggtggcccaggctagctagatgcctctgccccttgttcctggatctgacaaaccaaaccactttggtctagctgccaactgtggctgtgtggacagaattaaaagaggtcatgggaggatgtaaggagagttaaagcaatgagggaagtctagaaaaataaatccaaaatgggaagtcatttgctttgggaaaaaaagcatagacctgtctccctgactagaaacctaggaggctttccagttctatcaaccacttagtagctgtagacctcggacaagtcgctttaactttctgatcctcaatctgcttacgtagaaaaagacataaaaaaggctattccagaaaatctcagttccctcaccctccagttttgctggtcttgagggcaactgctaacagactcctggaaggaatcctttttttttttttttttttttttctgagtcagagtctcactatgttccccaggccagagtgcagtggcacaatctcagctcactgcaacctccacctcccaggttcaagcgattctcatgcctcagcctccagagtagctgcgactacaggcgtgtgccatcacgcccggctaattcttgtatttttagtagagacggagtttcaccttgttggccaggctggtctccaactcctgggctcacgtgatccgcctgcctcagccttccaaagtgttgggatttacaggcgtgagccaccacacccggccgggaattcttacataccagaagaagggcattatttcttctggtatatatactttctttgggaaaggtgtgttttgtggcaagtggggaaggggttgtttgttgattggtttattttttagagatgggatctcactatgtcacccaggttgacctcgaacttctgggctcaaataatcctccgccctcagcctcctgagtatctaggactataggcatgcaccaccacacctagcttggacaggtgtgtttttattttctttttttttcaccttttttattgttttaattttttttatttcaatggcttttggcgtacaagtggtttttggttacatggatggattatatagtggtgaattctgagattttagtgcacccatcacccaagtagtatacattgtatccattttacagttttttatccttcacccactcccaccctcccctttctgagtctctagtgtccatcataccactccacatgcctttgtgtactgatagcttagctctcacttctgagtgagaacatacagtatttggttttccattcctgagttacttcacttagaataacagcctccagctccatccaagttgccgaaaaagacattatttcattctttttctttttctttttttttctttttttgtttggagatggagttttgctcttgtcacccaggttggagtgcaatggctcgatctcagctcactgcaacctccgcctcccgggttcaagtgattctcctgtgtcagcctcccaagtagctgggattacaggtgcttgccaccacgcctggctaatttttgtatcattagtagagatggggtttcaccacgttggccaggctggtcttgtattcctgacctcaggtgatccgcacacctcagcctcaggagaatcgcttgaacccgggaggcagaggttgcagtgagccgagatcatgccactgcactccagcctggagggcaagagcaaaactctgtctcaataataataataataataatggccattctggctggggtaaggtggtatctcattatggttttaatttgtatttccctgatgattagtgatgttgagcattttttatgtgtgtgttggccgtttgtatatcttcttttgagaaatgtctcttcgtgtcatttgccccctttttaatgggattatttgtttatttgttttcttgctgatttgtttgagttccttgtagattctgtatattactcctttgttggacgcatagtttgcaaatattttcttccattctgtgggttctgtttactctgatgattttttcttttgctgtgcaagaagcttttcagtttaattaggtcccatttatttttgtttttgtggcatttgcttttcgggtcttagtcataaattctttgcctgcctaggcaaagaatgtccagaagagtttttcctaggttttcttctagaatttttatgatttcaggtcttagatttaagtctttgatccatctcaagttgatttttgcataaggtgagagatagggatacagtttcattcttctacatggggctagccagtttgcccagcaccatttattgaatagggtatcctttccccaacttacgttttcgtatgctttgtcaaatatcagttgtttgtaagtatttggctttatttctgggttctctattctgttccattggtctaatataactacttttattttattttatttttattatttgagacagtctctccctgttgcccaggctggagtgcagtggcgtgatcttgacctaccgcaatctctgcctcccaggctcaagtgattctcctgcctcagcctcctgagtagctaggattacaggcacgcaccaccatgcctggctaattttcgtactttcagtagagatgaggtttcaccatgttggccagcctagtctcgaactcctgacctcaggtgatccacaagcctcggcctcccaaagtgctgggattacaaatgtgagccaccgcgcccagttaatgtaactacttttatatcagtactattttgttttggtaactatagccttgtagtataatttgaagtccggtaatgtgatacctccagatttgttctttttgcttaggattgctttggctattctggctcttttttagttccatatgaattttaggattttttctgattctgtgaaaaatgatgttggtattttgataggaattgcactgaatctgtagattgctttgggcagtatggtcattttcacgatattgattctacccatccatgagcatagaatgtgtttccatttgtttgtgtcatctatgatttctttcagcagtgttttgtagttctccttgtagagctcttccagagaggtatgtttttaataaaataacttatctttaaatggaagcgaaaacgtgtggaaaacatcccaattggtgaggcagggtgaaaagaaatactgcaatttctgaaagctttggataaactcacacctgatagtttaccaaaggactcaaagatgacatttgggtcttcatgttccatgatgaccttgtctgagtcagaggaatccatggctcagccacagggtggcattttatgttcttgtgttctcacatccttcaaacatcctcactgctgcatatgcacgcccacaccttcttcccacatcccgaaaccactgcccgaagacaggccaggtgatcggcaaaatgaagcccctcagcttccagtgagcagacagaaggcttcttctcagcccctccttccccttgctgcttcccaggggagaggcagactgtggccctatgattttaggagcagtccctgtccccagttgcaatatgggttcaactcccgactatttattagtcttaggcctcttgctctgccctattttatgatgttcagaacaactctatgaaaatgataaggctggcatttttcaatcctgcctctacactgcaggtaggggtgaagcctcttcaatattgttttcctgctgagcatggtggctcacgcctgtaatcccagcactttggaaggctgaggcaggaggactgcttgaacccaagaggtcgaagctgcagtgagctatgattgtgccattgcactcagcctgggcaacagtgagaccctgcctgagaaagaaaaaaaaaaagtagtgtttttttcttactacttctcttttcagaatgctttcaactgcctgctattttgagtccaaattcgtggcatgaccttcaaaaacaagttatcattaattcagcacttactatgtgccaggcgttgaatctcttgtatcccctgaacctagtaacaactgtaggacaggcatgccactatctttcaaatgagtgaataaatcctcagaacagccagaaaagcaggtattattattccccattctattaatgaggagactgaggcctagagaagttaagccacttgcctgaggtcacagttaataagaagaaaaatcaagattcaaacccaggtctgtctgattctaaatcttggggatgctatatatatatataaaaatatatatatttctatatatagaaatatatatatagaaatatatagaaatatatatatcttattattttattttattttgagatggagtcttgctctgtcacccaggctggagtgcagtggcatgacctctgctcactgcaacctctgcctcccgggttcaagtgattttcgtgcctcagcctccccagtagctggaactacaggcgtgcatcaccacacacagctaatttttgtcttttttggtagacacggggttccaccatgttgcctaggctggtctcaaactcctggcctcaagtgatccacccacttcggcctcccaaagtgtggggattacaggcgtgagccacagtgcccggcaatatatggctttttaagtctcctccaccctcagcctccagagagcagacagacaggaacgttctggcctagcagacagccgtgtgatatttttggttccagttattaccgtggagatggttgcagctttctaggcagatggaagcacgccagctgccccatctacagacaccgccctccacaaatagcttatcaaaccctgaggattgcaatataataaagcagctgcccctgggaactcccacagccctcccaggatacacaccgttggccagccccaaccgctggtccacccctggaagaaggacttcttggaaaacctgttgttagaaggatttccttctaggtagctgctgtgcagccagtaaccagggctgctctcagggaggatggctccacctttcattgtgcgggcctccctgtagccagctctgctcctgtggaacctactgacctcttgtgggcagagtgtaaatgcactgcagctggacagcctcagagggtgcgggcttcagccagctcctcagtttgatttgtctctgacaatgctggagtgtgctggtctcttgacctcgctgcgccttggtttcctcacctatacaatggggaataaacaaatatccctgtcctacttgaaaacatgagaaaatactttttttttttttgagacagagtctcgctctgttgtccaggctggagtgcagcggcacgatcttggctcactgcaacctccgcctcccagattcaagcaattctcctgcctcagcctcctgagtagctgggattacaggcacgtgccaccacgcctggctaatttttgtatttttagtagagatggggtttcaccatgttggtctggctggtttcaaactcctgacttcgtgatccgcccgcctcggcctgccaaagtgctgggattacaggtgtgagccaccgcgcccggccgagaaaaggctttaattggggggaaatatatgggtaaattcaagatgccaaggtcccaggtgggcactcacaaaattgcagtacctgaccagaatgattagatattatccaacagtgctcattaacctttttaagtctgcagcagacacagaaaatggtatttgtgttgcacaaagaaggaggcttcttgtggccagagctgccccaggctcagcccagctaccccaaaggctgagagcagcaacatctcaggattcctggaatctttttgcagcacgtggggttgacagatgtgactgtattatacaagcagttgcagaagcagtgagcattgtcaggattctctttctcctctttccatataagtcagttaacaaaacgtttgggtgggtggccctacctcttagacacccacagagtccatagacacaggtagaaaccatcattgcacagttgggcaagggtcttatatgcctggcccaggcacaaggcagggttccacaggctctggatcctttgtgcttcttttgtaatgcagagaaattaagagatcacagcagattgtgttttgggataatctgggtctgtcagataccaaagagcctcctgtctcccgtcaaacctcgtttccttttctcctgctgtctacttgcactccactgactcattcatccaacaagcacttaataagtggcaaccaagcaccaaaccttgtgccaggtcgtgggattacaggatgaaactgttgccttcaaggaactcagtctcatagaaagacagacacagaaagagaggcactggataggctgcaagagatccagtggatgtctgtaaagaggagaggaagtgcgagggcctaagtcaacctcagagagtcagggacacttgtaaagacacctgaagattaaataaggggtgggggagggaagagtaaccagggaggaacaaggcagctttgcagagagaagaacatatgcaaaggaggccccaagacatgacaaaatgaagcatgttcaaagcacttcaagtagcccagttgtgctagaatataaagtgctagatggggcgggggcgatggaaccagacaggcaagggccacatgagaggggtgccaattgaaggggtttttattcaatacttcatcatttattaaatagttcagccacaggcacggtggcttacgcctgtaatcccagcactttgggaggctgaggtgagtggatcgtctgaggccaggagtttgagagcagcctggtcaacatggcgaaacgcctctctacaaatatacaaaaattagccgggcgtggtggtaggctcctgtcgtcccagctactctggtggctgaggcatgtgaatcgcctgaacccaggacacagaggttgcagtgagccaagatcgcaccactgcactccagcctgggcaacaaagtgagactccgtctcaaaaataaatagataaataaataaataaaggcaacagggggccactggggcatcttaaacagaagaatgccatgatccaaattacatttttttttgagatggagtcttgctatgttgctcaggtcagccttggcatcctgggctcaagatatcctcctgcctcagcctcctgagtagctggaactacaggcacgtgccaccaaattactttggttgttgggaagtaagtaagaagggagagagattgtgctgagagaaatctgttttctggcttgagtaaccagatacacagtagcattcactgaatccgggaacacagggaggacccagtttgaagcagggaatgaagacaagagccattgtgaatacactgggtttgagatacctgtaagacacgaacgtagggtgtctaatagtcggatataaaagtgtttcatgggtagggcacagtggctcacacctgtaatcccagtgcattgggaggcagagcggggaggattgcctgaagccggaaatttggggctgtagcaggcaatgatcacaccattacactccagcctctgtgctccaagctgggtgacagagcaagaccctgtctcaaataaataaataaagtaagtaaaataaaaaaataaagtgggtgagggccagatgcagtggctcacgcctgtaatcccagcacttggggaggcccaggcgggtggatcacttgaggtcaggagttcgagaccagcctggccaacatggcgaaaccccgtctctaccaaaaaatacaaaaattagccaggcgtggtgatggacacctgtagtcacagctactcaggagggtgaggcaggagaagcacttgaacccaggaggcggaggctgcaatgagccgagattgcaccactgcactccagcgtggacaatagagtgaggaaacaagaaaaaaagaaagaaagaaagaaagaaagagggggagagagagggagggagggaggaagggagggaggaaggaaggaaggaaggaaaagaaagaaaagaaagtgggagagggccaagtgtcctagaaatgaagggaagaggggatggccatcggagccacactcacatagaagtcaaataagacagggctgaaaaaggagaaccatttcagcagtgatggagaccgaagcaagatcacagtaggcctcttcaagaagcttagactgtgaaggggaggaaagaatgaaagctagaagtaggctctgtgtcaaaggtttttgttgaaggcattagttcaaatgtacatgctgaggaggagagatggagaaagaggggaaggttgaggcttcaggaaagagaggaggtaagtaatagagcaaagtccaaggggaagtgaggaggactgaactgaatacatgggggaggtgggtgtcagcctggggcaggaggagggagttaggggagggggagagggtggtgcaggttggatttgctgagcagactctgagatggagattagcatgcaggaggtttcttagggagtactcttgggatcatcacgcgtggaaaggaaggaatggaagcaggactggagaaaggagacattgggctgcaatgcagattcaacaaaggcctcagccagacctatgggaagctctgaagctaagagtggagacaagggggccaggcctttatatccccacatcagtcattcattggacacaggctgtcctgggaaggaggcatgcccttgggcaaagtgggtttcttcagctgaggctgtccccaaaggggtccaccagctgagggctctctactgttaggcactgagtctttctgttgtgaagatcagggaagcacattgcagtgtctcctatagagaggaagggggcgctattgcatttgagttgaatctgcagcccagttggtgtgaggctgaagttcacgctgttggcttcaattttgctccgtgaagatggaaaccaatctttctgatgaaaagggggctagctggggttgggggctagaggagagtgaaatgatgatgaaatggctgcttcaggacactgaagatgcgctgaccagggacatacaataggattgccaagcgatgttagggtcttagttgaaactaaaaaaatcattttagcaggcccaaacagtgtcgcgatttcaaggctctgtcattcttggtcacttggatatctgtccttcctcctatggatttttgttagtttttatgaggaaatgtctatattatttagaggagaatattttgtgagaccgtgttcctaaattctgcaactttttacctaaactacttcctgaaccaggcctaaattcaaggccttcagtatataattacaattttcgctacaacaatcgttgctgatgctaatgatgacaatcttgctagtggcaaacaaaactgtgtggatattaaaatattataaaccaattagaaaatgacttcaggcctgacaataaagaagataaacacttgtctacaagtagacaaataaaaatcaggattaaatctaattagcaggcaaatacaaaatgtagaaaattacaaaggaaaacgaaatttgaagcttcaaggaaaaaaaacactgctataataacgaaatatagaacaggtggttcatcaggtactagagtgacaatagacaagtacaccgtccaattaaacaatcggcttttaaaatccatacaggaattatgtggatgatcattcaaaaacaatgtctcactgttctgtgaagaaagggtcccccacatgagggggagcagttataatgagaattcactaggcctaaagtgtaggctaggtaaccaaccgtgccttgctcacgaaaccagcttgttattccagagtaactatgagcaagcaacaaccatgttcatagtagcagtagcaatacggttctttcgttttgtttttttttgagacggagtttcacctcttgccgcccaggctggagtgcaatggtgcgatcttggctcactgcaacctccgcctcctgggttcaagtgattcttgtgcctcagcctcctgagaagccaggattacaggcgcctgccaccacgcccagctactttttgtatttttagtagagacagggtttaccgtgttggctgggcttgtctcgaactcctgacctcaggtgatccgcctgcctcagcctcccaaagtgctgggattacaggaatgagccaccacgcccggccagcaatacagttcttaggggaaaaaatgaaatgtccagttcaagaataaaatcaacattcatgatggggcctcactcggcctccctgcacagatttgtcaccgaacatacatttcaacaaaggctttggtgcccaagtgacttcaattgtagaaattttaggacataaaggatggaagacctatagggaaactctttaggaggaattaaccaggtgtaccttaaaatcactctagggccgggtgcagtggctcacgcctataattccagcactttgggaggccgacatgggtggatcacttgaggccaggagttcgagaccagcctggccaacatggcgaaactccatctctactaaaaatacaaaaattagccaggcgtggtggtgcacccctgtaatcccagctactcgggaggctgaggtgggagtatcgcttgaacccaggaggcagaggttgcagtgagtcaaaatcatgctactaattaggagatatacctaatgtaaatgacgagttaatgggtgcagcacaccaacatggcacatgtatacatatgtaacaaacctgcatgctgtgcacatgtaccctagaacttaaagtataataataaaaaaaaaatcatgctactgcactccagcctggactacagagtgagactctgtctcaaaaaaaaataaaaatcactctagatatgaggggagtcggtactctttccagcccaactttagagaacagctggagatacccacagcctccaacggtggaacacttccagcaagtataatcttacagctcttttctaccagcctgcctgaccacgaggcactaatcccaggagctccaactactgttccccagtcctttaccccctatctcagaaagacacacatgtactgtcaacttaaataacagaaagagactctctaatagaaaatgacatttattcgggaatagggcattgcaatgggaataataacaccatagtaaactatgtgcatattcagggaggtaaaggaagacaaaggcttttaaaggaaaaatgggccaggcgtgatggctcacgcctgtaatcccaacactttgggaggccgaggcgggcagatcacctgaggtcaggagttctagaccagcctgaccaacatggagaaatcccgtctctactaaaaatacaaaattagctgggcatggtggcgcatgcctgtaatcccagctacttgggaggctgaggcaggagaatcgcttgaacctgggaggtggaggttgcggtgagccaagatcacgccattgcactccagcctgggcaacaagagcgaaactccatctcaaaaaaaaaaaaggaaaaatgaggattatataattgtttttgaaatgattatccttggctacaaagatcaataacaagggtgatgccagtctgaggctggacaggcagttgctgggcagatgtccttgcagaagtttttttttgttattttgtgtgtgtgtgtctgtgtgtgtgtgtgtgttttttttttttttttttttttttgagatggagttttgctcttgttgcccaggctggagtgcaatggcatgatctcggcttgctgcaacctccgcctcccggttcaagtgattctcctgcctcagcctcccaagtagctgggattacagctgcccgccaccacgcctggctaattttgtatttttagtagagatggggtttctccatgttggtcaggctggtcttgaactcccgacctcaggtgatccacctgcctagctctcctaaaatgctgggattacacgcgtgagccactgcgcccggccagaagtattttttgtgtaaggttgcaatggccattgtgcaaggttgtggtttttgtggagttttttgtgatagtcttgttatcatacaagtgtgagaatcctctcttacatagccttgcctagctctatgtgtcagggctttttaaaaaatataaaagtgactccattttgattctgacaactttcacagtacacatgcacagaaaaagtattgatgatcttggtgatcttctgaatctccaaggatacctaccttaccatgttccagacaatctactaagggctttgtgctcatattacccctttcttcctctcaagaactctataaagcaggtacttctattatccccattttatagatgaggacatggatgcacaaagaggtaacatgacttacttaagatctcagccagtaagtgacagagccaggacacaaacctaggcgatctgatagtaaggctgtacatttcccctaatgctatgatgcctcccacattttgaggactagaccagtgattcctaaccattcttttttcattggtccctctgaaaattgggtgaaatcaacaaatcctctccccagaaaaatgcccatctgttcacaagcacacagaacatatttaatttcaaggagcttggggactccctgaagctcatccctgaagcccatggagcccaggttaagagcttctattgtgtaggctagcacgctctcgggaagcaatttggcctagaccccacccaactcatcataccccttgcttcccctgggagagctcaccccctgtgctttaggctactctcacagctgaagttcagaatgctctagggctttgtaacctggctttgtaacctgacacttgtgacctcatatttgtcccaacatactatgtccatgccatctcctgctgcaccaggatgaggtctctactgggctagcccagccctggtccagagaagataagctcaaagattgttcacaaagagagcagggcatagtgcttcaactccagaaacagggagggaaatcaagttccctggcagagcaaataaaaactggtgatgcccaaaagccaagacttggaagcaacctaagtgtccatcaacaggcaaatggataaagaaaatgtggtacatacacacaatggagcactattcagccataaaagagtgagatcctgtcatttcaataacatgatagaactggagggcattatgttaagtgatataagccaggcacagaaagacaaactttacatgttctcacttatttgtgggagctagaaatgaattcatggagagagagagagtagcaggatagttaccagaggctgggaatggtagtggggagttgtggggggggaagtgtggatggttaatgggtacaaaaaatagaataagatctagtatttgatagcacaacagtgtgactatagccaatcatttaattgtacattttaaaataactaaaagagtgtcattagattgtttgtaatacaaggataaacgcttgaggtgacggataccccatttaccctgatgtgatttttacacattgtatacctatatcaaaatatcccatatgccccataaatatatacacctactatgcacccacaaaaataaaaagaaaactggtgatgccaagggctccccaaacaatggccagaactggaagtacagtcaggaaaggatacaagtggacacaggtggaaacctgctctgggggcatctagggtgggtgctgtggtttggcctccccaaccagacattcagatttgagctgctccagagcgctcagcaggaaagacatgtgagattcacatttgaactcagaataggtcggggaaaaccacatttgcggttcattcattctgtcaacagatggtatttagcatttgttttttgttgttggtttttttttgttttgttttgttttttgagacggagtctcactctgttgcccaggctggagtgcaggggcatgatctcggctcaccacagcctccacctcccagattcaagcgattctcctgcctcagcctcctgagtagctgggactacagatgtgcgccaccatgcctggctaatttttgtatttttagtagagatggggtttcactatgttggccgtgctggtctcgaactcctgaccttgtgatccacccacctcggcctcccaaagtgctgggattacagccgtaagccactgcgcctggcctgtttttcgttgttattgttgtttttgagaccaagtctcattctgttgcccaggctggagtgcagaggtatgatcttgtctcactacaacctctgcctcccgggttcaagcgattctcgtgcctcagcctcccgagtagctgggattacaggcacccgccaccacacccggctaatttttgtatttttagtagagacggggtttcaccatgttggccaggctggtctccaactcctgacctcaggtgatccacccaccttggcctcccaaagtgctgggatttataggcgtaagccaccgcgcccggacggtatttagcatttgtttccttaccaagcagttatctgccaggcactgtactaagttagcactttacaaatatcaactcacttaattttcacaaaaccataatgagatgagtactactattgtccccattttagacacaggaaacctgaagcacaagagagattaagcgacttggccagttacacagctagtaagtgacagagccaggacgcaaatctaggcgatctgatagtaaggatgtacatttcccataatgctatgatgcctcccacattttcaggaccagatctgtgattcctaaccattcttttttcatcagcagagctgggactcaaactcaggcagtcaggcctgcagcacccatgctctgaaccaccgtcttctgcagctagtgtgatccagaggcttggctagttactggcaatagagcagtgaacaggccagacatgatctctgccttcaaggtgtttacattctagagtggcccctgagtagtcaacaggcaattccatcaagttatgatgagttccatgttgggggtccgggaggctgtgagtgggctccatattgggctgggttctgggcttcagagcagaagccaacaggttgtagggacacctttcttgggttcaggatcaaagaggccaaacaggagtaggggagccatttctgattgtggggcctgcctttcagctcccattctgaagctgggaaaccaaacagctgtgagtgagtctcacatcaggaacagaagcagcacaggaaccaaacaagcgtggtcactcccgccaggggtatcagaacagcagatcctacagacctgtttcctcatcaatctctcctcgcagagactacaagctccctgagggtaagacctaggcctgcctttctccctcattctctcagtgcccagcacaaggttggcacctaatcaacactcagtaaacacagtagatgctcaataaatattacttggatgaatggattaaataaacatttaatctactgttacccagaactttactcttattattattttttatttatttattttttaagacagaatctcgttctgtcgcccaggctggagtgcagtagcatgatctcggctcactgcaacctctgcctcccaggttcaagtgattatcgtgcctcagcctcctgggtagctgggactacaagcatgtgccaccacacctggctaattttttgtatgtttagtagagacggggtttcaccatgttggccaggctggtctcgaactgctgacctcaagtgatccacccgcctcggcctcccaaagtgctgggattacaagcgtgagccacaacgcccggcccggaactctactagactctggggtatagcagtgaacaacaacagaaaaaatccctgtccccactaaacttttagcttatagtgggagcaccagacaatgagcaaaatgagcaaatatttatatagggttttagcgaaaaactataggaggagagggggataggaagtatgaggaggcgatgaaattttagatacaatggtcagcaaaatcctctgagaaaatgacattttctcagacaaaatcaagacctgaaggaagtgagggtgggccgtttgcagatacctgaggaaaaaatgtcaaggcaggaatgtgcctggcatgtctgagggccagggaggagatcactgtggctggagcagagtgagctgatagggactggagtaggagttgaggtcagaatgaatgaacaagtggagactgggaatggtaccaagaagcaggggaaccaaaccagttccacagccagaagccctccaagtcctgactggccccatggggaaagggagaggagagcccccacaagagtgcctattaactcacactcctccagctccattccaaaggcatgacttgagtccctaccccatgcccagccctgaaactcctggaaaaaaagcaggatattccttgaacctcctctttctcctcaattgggaataagggctgagctggcaggaacaagctgagattgagaattgacctgtagagcttacacagtccacccttcctccagaatattccatttgtccttggagacagcatgacggagccatgatgggctctggccatctgttccctctggtccttctgaaagaaaacactttcagaccaggcaccgtggctcatgcctgtaatcccagcactgtgggaggctgaggagggaggatcatttgaggcctggagtttaagaccagcatgggcaacatggagaaaccctgtccctacaaaaaaaaaagaaaaaaaaatatatatatatatatactctctctatatagtatatatataaggttggtgcaaaagtaattgcagtttttgtaacgtgatggcaaaagccacaattacttttgcaccaacttaatataaatatagttatatatataatgcttatacttaaatatataaaagccagacgtggtggcacatgcctgttgtcccagctacttcggaggctgaggttggaaggaacacgagcccaggaggtggaggctgccgtaagccagcatcacaccactgtaccctagtgtgggcaacagagtgagaccttgtctcaaaaacaaaaacaaaaacaaaaaacacttccaattagagtctttagacagcacatttctttgaaagttccacttttccaccctcctccctcactctggccccaccaccagaggcaaaaagagtcactggcactgccctccttttgggatccctgtgtccaaggaggtgggcctgcactgtccccaaagagttccaaggtcaaaccctccattatctaaaaaatggtttgggccgagcacggtggctcatgcctgtaatcccagcactttcggaggccgaggtgggcagatcgcctgaggtcaggaattcaagaccagcctggccaacatggtgaaattccatctctactaaaaatacatcattagccaggcgtggtggtgggcatctgtagtcccagctacttgggaggctgaggcaggagaatcgcttgaatctgggcagcagaggctgcagtgagctgagatcgcgccactgcgctccagcctgggcgacagagcgagactccatctcaattaaaaaaaaaaaaaaaagaatggttagaaggaactctttagacactttggacacaagcccttcacgatttttgtcttacaagtatgttcaccttctctgtagcttttctaccctcgatagcatcttttgatgagcaggtgcttttttttttttttttttttttgagagggagtctcgctctgttgcccaggctggagtgcagtggcaccatctcggctcactgcaatctccgcctcctgggttcaagcgattctctgcctcagcctcccgagtagctgggactacaggcgcccgccaccatgcccggctaatttttgtttttgttgttgtttttgttttttttttcttttagtacagatggtgtttcaccatcttggccaggctggtcttgaactcctgacctcacgatccacccgcctcaggctcccaaagtgctgggattacagacatgagccaccgtgcctagcctgagcaggtgctcttacactgaatgcggtatccatcttttctttcatggttagtggttttgtcttaagaggtctttcatttcccagagataatgaaaatgtttttattattttctagaagttttaccactttgctttttacatttagatctcatttacctggaattgacttttgtggatgatgagaggtagggggtcaagttttctttttgccatgggaatagacaattgtcttagcaaaatttattacaaaaaaattctttccggccgggcgtggtggctcacacctgtaatcccagcactttgaaggctgaagcgggtggatcacctgaggtcagaagttcgagaccagcctaaccaacatggtgaaaccctgtctctactaaaaatacaaaaattagccaggtgtggtagtgcgcgcctgtaatcccagctactcaggagactgaggcacgagaatcgcttgaacctgggaggcaaaggttgcagtgagccgagaccgcgccattgcactccagcctgagtgacaagagcaaaactccatctcgaaaaaaaagaaaaaagaaaagaaaaaaattatttcctcactgaatagcaggggcgcctttgctgtacatctagtgactgcacatgtgagcctgtttctggactctctattgtttcattgatctattgtccatcactgggccaataccatactgtttaaattactttcaatatataataaaacaatatctagtagaacaagtcctatcaccttgttcttcaagagtgatattggaccttttcattctgtataaatttcactcctattcttggactttctccttgctttataaatttaaattagcttgtcaagtctcccctgccccctgcccagcaccacgtggacatatgcacacgtggacacacacacacaattgttgagatttttattgtggtctcactgaatctataaatcagtttgtggagaactgacactttaaagctattgagtcttccacatgaacacagtgtatcattccatttactcaggttttaatttttctcaacgatattttatagtcttctatgtaaaggcctgcataatacttccttagatttatcctcaggtatctttatgctattttaatcatttaatatgtctaattttaaatgttacgtttccaactgctggttacttagatacagaatacaattggttttctatattaaccgcatgtccagcaacttctttttttttgagacggagtcttgctctgtcacccaggctggagtgcagtggtgcaatctcggctcactgcaacctccgcctcctgggttcaagcgattctcctgcctcagccttccgagtagctgggactacagatgcacactaccacacccagcaaatttctgtatttttagtagagatgaggtttagtagtggccaggcggtctcgaactcctgacctcgtgatccacccacctcggcttcccaactgctgggattacaggcgtgagccaccgcaactggccaacttttctaaattcatttatcaattcaaatatttattcttcagttattttggatattctatatacacaatcatgttttctacaaataatgatgttgttatttcttccaagtctttaaacgttttgtttccttttcttctcattgcactggctaggattcccagtaccatggtaataaagggaatctttgtctcatttccaacttcaggaggcaagcttttaagtatgcttgctgtaggattttttaatagatgccattaatcataatttaaaagttttcttctattcctagttcatttccatgtgtatccttacaattaatccctctcattttctaacattcaaaagagcctaattaaaacaatgataaatgtgtcactttcttttaaatattaatacctcatatatttttcttaaaaaaaaactttttaaaactagagacagggtctcaccatgttgcctaggctgctctcgaactcctgggctcaagcgatcctcctgccttggcctcccaaagtgctagaattacaggtatgaaccaccctgcctggctcccacatttttcttaatttttaattgacacataataactgtacatattatgggatacaatgtgatgttctgatacatgtatacaatgtgtaatgatcaaatcagggtaattaacatatccatcacctcaaatatttatcatttgtatgtgataacactcaaaatcctttcttgtattttgaaatatacattattgttaacaataatcatcctattgtgtaacagaacatcagaacttattcctcctaattgtaactttgtacctattgaccaatctctgccatccctccttccccctccccaggctatagtaaccactgttctatcctctacttctataaaatcaacttttttttacattcaatatgagtgagattatggggtatttccctttctgcgtctggctaatttcacttaacataatgtcctctaggttcatccatgttgttacaaatgatgggatttcatttctttttatggctgaataatattccatcgtgtatatgtatatatatgcgcgtgtgtatgtatgtgtatatatacacacatacacacatatatatatatgaactgggattgctgtatcatatggtagttctatttttaattttctgaggaacatcccatactgtgttccataatggctgtagcaatttacatttccaccagcagtatgtaagggttcccttttctccacatcctcgccaacccttaccttttgtctttttgataatagccattctaactaaagtgaggtgatatctccctcacatcacctcactttgatttgcattttcctgattagtgatgttcagcattttttcatatacttgttggccattctgtatgccttcttttcagaaatgtctataaaggtattttgcccgtttaaaaatcagattgaggccaggtgcggtggctcacgcctataatcccagcattttgggaggctgaggcggatggatcgtttgaggtcaggagttcaagaccatcctggccaacataccccgtctctaccaaaaatacaaaaattagccgggcattggtggtgcgcacctgtaatcccagctacttgggaggctgaggcctgagaatcacttgagcccggacggtgcaggttgtggtgagctgagatcgcaccactgcactccagtctgggtgacagagtgagaccctgtctcaaaaaaaaaaaaaaaaaaaaaatcagattaaggccgggcacggtggctcacacctgtaatcccagcactttagaaggccaaggcaggtggatcacctgagctcaggagttcaagaccagcctggccaacacggtgaaactccgtctctactaaaaatacaaaaattagctaggcatggtggcgggtgcctgtaatcccagctacttgggaggctgaggcaggagaatcgcttgaacctgggagggtgaggttgcagtgagccaagaccgtgccattgcactccagcctgggcaacaagtgcaaaactccatctcaaaaaaaaaaaaaatcggattgagtttttgctattgagtttgaattccttatacagtctggatattaaccccttgtcagatgtagaatttgcaaatattttctctcattatgtaggttatatcttcactctgtggactgtttcctttggtggacagctttttagtttgatgtaatcctacttgtctatttttgcttttgagttcatatgaaaaaaaaaaaaaaaaaaaccttgcccagcccaatgtcataaagcatttcccttttcttctagctgtttcagtttcagatcctacatttaagcctttaatccactgggttagtttttgtatatggtgagagagaggggtctggttttattcttctgcatatagatatgcagttttcccagcaacatttattgaagagactgtcctttccctaatgtgtgttattggcgcttttgttgaaaatctgttggctatagatgcgtggatttatttctgggctcactattctgtttcattgatcgatgcatcccagcaactcgggaggctgaaatatgagagtttcttcagcctgggaggcagaggttacagtgagctgagatcgcgccaatgcactccagcgtgggagacagagtaaaactgtctcaaaaaaaaaaaagcaccgattccatctggttgttttcaaaaggaaaaattaattgtatttctctgaaaatgaaaatgactgttttgggaaactctaagtttaccatccctggagactttaaagcaaaggctggaccagtatgtgtctaggaggctacacaggaaattcctgcacacaagagaaggttagagggtatgacatctaaggtcttttctaaacttcagtgatgaagatcctgtgactctgcatttctataaatcctatcattgggccaggcacagtggctcatgcctgtaatcccagcactttgggagtccaaggcagacaaatcacccgaggtcaggagtttgagaccagccaggccaacgtggtaaaactccatctctactaaaaatacaaaaattagccgggggtggtggcacgcacctgtaatcccagttacttgggagggtgaggcaggaaaatcacttgtactcaggaggcggaggttgcggtgagccgagatcgtgccaccgcactccagcctgggtgacagagtgagactccatctcaaaaaaataaataaataaatcctattattgtactgcttctgcaccagatcccattccctcctgcctactcaagtatattgcttcagttattttctctctcctgcattatcagtttttacttctctcttggatttttccttatcagcattcaaatatgctgttatttctcccatcttgaaaatactgttaatcttacttccccctccaaataccaccccctttctcttcttccctttcatagcaaaactccaaaaaaaagtacctatattcactacctccaattcctcttctttcattgtctcttgaactcagtcctgctagcctttcgcttatgccactccattcaaacaccttgtaaaagttaccaatgacctccccattgctaaatgcagtggtcatttccaagtcctcatcttgtctgtggcatttggcagatgatcatttcctcctcctttaaacacaggctggtcatttgtctatttgctctcagactcattccccgcttctcaaactcctgacctcaagtgatccacctgcctcagcctcccgaagttgctgggattacaggcgtgagccaccgtgcctggccccattccactcttcccctgctctgctatgtgcagcagacaacatttcccaggctcctttccctcctgacttcctgagaggtttggcctgtgaatgggaatctttggcagaagactggaaagcaagagaagggaagaagccagggtatttcctccctttctctctgttttgagcgtcatctccagcatagactgttatctcttctgtggctcccactagatagtcactccctccatggaccaagctcctgctgggctggtgttcctgcttctgctgggtggtccttgatcccggacttgggtaataccaccttctgcttttgtccctccagccctagaggtgaagtagcttcctgctgttgctaaatctctggatcaattcatcatcccttcctgggattctaaggtcttctatcccctgagtaccagttcctcatgttaaattctgtttacaactctgaatacgttttgttttctttttttcttttttaaaacggttgttcgctcttgttgcccaggctgaagtgcaatggtgtgatcttggctcaccacaacctccgcctctcgggttcaagcaattctcctgcctcatcctcccgagtagctgggatcacaagcatgcaccaccacgcccggctaattttgtattttcagtagagacggggtttctccacgttggtcaggctggtctcgaactcccgacctcaggtgatccacctgcctcagcctcccaaagttgttttctgttttcttaactggacctcgagtcatgtaaaacacttgcttctcttcactctcagttttactctgtcttcatccagccttagtagccattcctttgcagtcttttttgctgatttctcctcctctcttgaccattaaatgatgccccaggactcaatccttggacttattccctttgctatctgtatttagatctttggcaatttcatcctgtctcatggctttaagtaacatctatatactgacaactcccaaatttatatttctagctagaccttcccagttgagctgactacatatccaactgcctacctgacaactccacttagtcaacagacatttcaaacataacatgttcaaaatggtgcttggctttcccttgaaagctgttcttccccatctcagtaaatgacacttcaatttgcccagttattctagccacaattgaggagttatccttgattcccctcttcccctcacttctcacaccaaatctatcacccagtcctcataggaaaacctccaaaacacatctcaaatccattcactttctccaattcttcttttactaccctggtccaaccattctcacctctcacctggactaccgccatggtctcctaattggtctctctgcttccattctgcctcccaaaaagccactctccatgcagcagctagaatggctttttttttttttttttttttgagacagagccttgctctgttgcccaggctggagtgcagtggcacaatgtcggctcactgcagcctctgtctcccgggttcaagcgattctcacgcctcagctccagagtaggtgggactacatataggtgtgtgccaccacacccggctaatttttttatttttagtacaggtggggtttcaccatgttgcccaggctggtcttgaactcctgacctcaagtgatctgcctgcctcaacctcccaaagtgctgggattataagcgtgagccaccgcacccagcctcgaatgactttaaaacataaattggctgggcacggtggcatatgtctgtaatccagcactttgagaggccaaggcaggaggatcacttgagcccaggagttcaagaccagccagggcaacctagtgagaaaaaaaggacaggacaggacaggacaggacaggacaggacatgacaggaaaaagggaaggacaggaaaaagaaaaaggaaaggaaaggaggaatttctttctacaaaaaatagaaaaaattagccaggcgtggaagcacgtgcctgtagtcccagctactacttgggaggctgacgtaggaggattgcttgagcccaggaagttggggctacagtgagctatgatggtgccactgcactccagcctgggcaacagagaccctatctcaaaaaaaagaaaaaaaaaacctataaatcatatcatgttactcctctgcttaaaagccttcaatcaataacttctcactgtatttttaagaaccaaaatccttattcaggcctgcaaggccctacatggcctggtttctgctcactcctctgacctcgcctccttccacttgcttgctttctcttactcactacaacctagtcacactggccttatttctgttcctccaacatgtaaacttattccctttgtagggcctttgtcctttctaatgccatcatcacctggaacgctttcccctgatccttatatggctggctcattcagatccttcaggtcttatgtggctcagtgtcccctcctcagagcccatccttgattactcatcactcgctatcatatcacactattttcgtagataattttcttgttcacttgttcatctgtcacccctgccctcagaatgtgagctgctttgttctctactatgcccccagctcctagtgcaatatctggcatataatagatactcaatgtatactagttgaatgactaaaagtagattagccttaagtaggaagagggggatctcttcctctgagatttgaaagagaaaaagatggaggcagacacaactaagtgtgcccttaagttgctggtgctttggagatccctctctggtcatctaccaagagagagagcttgcagggagaggcttgaagaaagcagctgtaaactgttccttagggaaacaggagagttgctgacccaaaacatacattaggattgactagctgtggtaagaacccatctgacactggaaccataaattcacagtgccaaatatccactcattgacaagacatgaacactcaactatttgggtaagacatcagacaaaacatattgtaggactgattctaaattgagagtttgtaggacagatgttatagttttaaaagaaggtaagatctacaatagcaccggaaaaatgaagtacttaggtataaatttaaacaaaatatctgcaggacctatacacgaaaaaaataacaaaacactgatgaaagaaatcaaagatctaaacaaatggaaagtggaaagatacactttgctcatgggttggaagatgtaatattattaagatgtcaattctccccaacgtgatttttcgattttacacaatcccaatcaaaatcccagaaagaatactggagataccaacaagccaattctaaaatgtatactggaggccgggagcagtggctcacacctgtaatcccagcactttgggaggctgaggtgggtggatcacttgaggtcaattcgagaccagcctggccaatatggtgaaactccgtctctactaaaaatacaaaaattagccaggcgtggtagcatacacctgtagtcccagctactcaggaggctgaggcaggagaatctcttgaacctggcaggtggaggttgcagtgagccgagattatgccactgcactccagcctggacgacagagcgagactctgtctcaaaaaaaaaaaaaaaaattaacaaccacacaaaaaaatcaaataatctaattttaaaatgatcaaaagaacttgaatagacatttctctaaagatgatatacaaatggccaacaagcatatgaaaaaatgctcaacagcactaatcattagagaaatgaaaaaaaaaaaaagaacctacaatgagatatcacctcacatccattaggatgattactattaaaaaaataaaaataaaaaaataacaagtgttggtgaggatgtggagaaattagagccttggtgtattgttgataacattgtaaaatgtggccgggcgcagtgactcacgcctgtaatcccagcattctgggaggctgaggtgggcagatcacttgaggtcaggagtttcagaccagcctggccaacatggtgaaactccatctctactaaaaatacaaaaatgagctgggcatggtggcacacacctgtaatcccagctacttgggaggctgaggtgagagaatcacttgagcccaggaggcagaggttgcagtgagctgagatcgcaccactgcactccagcttgggtgacagagtgagactctgtctcaaaaacaaacaaaaaaagattgtaaaatggtacaagtgctgtggaaaacagtatgtatggaggtgcctcaaaaaattaaaaatagaactaccagcaatttcacttttgggtatatatcagaattgaaagcagggtctcagagatatttgcacactcatgttcattgtgctactattccacaatagcaaggggtggaagcaacccaaatgtccattgacggatgaatggataaacaaaatgtggtatagacatacaagggaacattactcagccttagaaaggaaggtgttcttcctttctaatgattcaacattgaggacattatgctaagtgaaataagccagtcacaaaaagttaaatgttgtatcattccacttacatgagatatctaaagtagtcaaattcataaaaacacaaagtagaatggtgttaccaggggttgtggggagagagaaagggggagttgttacttaataggtatagagtttcagatttacaacatgaaaaagttctggaaatctgtatcacaacaattcaaatatacttaacactactgaactacacaattaaaaatggttaagatgggccaggcacggtggctcacgcctgtaatcccagcactttgggaagccaaggcaggcagatcacaaggtcaggagtttgagaccagcctggccaacatggagaaacctcatctctactaaaaatacaaaaactagccgggcatagtggcaggcgcctgtaatcccagctacttgggaagctgaggcaggagaatcgcttgaacctgggaggcagaggttgcagtgagccgagattgcgccattgcactccggcctgggctatgacagcaaaactccgtctcaaaaaaaaaaaaaaaaagaaaaagaaaaaaaagaaaggttaagatggtaaactttatgtgttttttaccacagtttaaaaaaaaaaaaaaaggaaaacagtatgttccacaccatctgccattagggaaatgcaaattaaaattacaagataccatgaagaaactgttgcaaattagagaccaaggagacatgggcagagtgacatggaacctaaaatggctcaggcaacctagttttttaaaaatcttttcaatttatcttaaaaaataaagtgacatttccaaatgtcactaattaatagagaacattttgcaacattttaatgttttgtcatacttgataatttgcaaaaacaaaaacaaaaatatgataagactctccaaaatgtcaacatggctcttcataccaacagcaaaacgctgtatttcctgttaaaatacaagttaataaagaaaatagagaaactaaatactaacatatcatgttattttaataactatttaaatatgaggtgtggtggctcacacctgtaatcccagcactttgggaggctgaggcaggtggatcacaaggtcaggagatggagaccatcctggctaacacagtgaaaccccgtctctactaaaaaaaaaaatacaaaaattagccgggcatggtggcaggtgcctgcagtcccagctactcgggaggctgaggcaggagaatggcgtaaacccgggaggcggagcttgcagtgagccgagatcgtgccactgcactccagtctgggcgacagagcgagactccatctctaaaaaaaaaaaaaaaaaaaagagtaaaacataatgaaaagcatatgcttgcttggtgctaatgacgttttacagtcttatagatgaagcaacatgtgtaatttcaaccagatgttgaaatggtttaggattagtatctaaagacaagtatttcagaaaatatgtagaaaggtaaccatacacttgctacagggggtcctctatgcaactgtcttgactttgcactttatttttcaaaatgaaattataatctgttctgaataacatatatgttttaagttcatagagggagttcagcatagttaagagctcaggttttagagtcagatttttggctttattgcttactgggctataggatcttgagaaacttaaaactctctgagcctcggagtactcatttctaaaacaaggatggtaacagttaatcctgtcccgtaggatgtcgtgttgtttagattaagataatacctgtaaagtgctttccatggcatccaacacatagtaagtgctcaataaaaggtagctagtattattgttgctattcttactactattttttcattattactgttaataaaataatcacccttcaaatctaaaaacaaaataaaataggtttagaggaagtgagcacatgagagtagcaaggataggttgtggtcagagagcagagtactggatttcagaggtggagtggatgacatccaggctgtggtatgggagtttgtggctaaagtgcaggaaaggtaaaggtcactgtctggagttgaggttaaggaactgtaaggttatggtttctcatccacatgacggttaattatctctcagaatgaggacgggaaacaaggtagagaggaagaattggttgcgaagacttcactggatacaggaaaataactgggaagaaggtaacacagccccatcctgggccttcctgggacccccacccctctttttcccagttcttgctagctcacatctaacctactttgccttgcaaataaggagatcagaaaaaaagcaaaacaaacaaacaaaccaaacaaaaacaaaaacatacaaacaaaaaaaaacctgccctactatcctactatcatctcccggtagcacctcacgaacctgccttgggcacctactaagtgcaactttttgtagataatacaagaaggttaacacaactcctgtcccaacaccttttaatacagttgaatggataaaaacatggatacaaacacatggatataggtatcattgaagcagtgtgacataaaataacatctatatatacaacactcctctgcaaataacaaatgtaaagtaaaagatacccaacaaatcattttgtttatcttgctatcatttcttaatctataacgtctccctcccatgtatccatgcaaggaagcagtatcagctgcccgactagagggtagctccctcccttgggttacttttttttttttttttttttgtagagacagagtctcactctgtcgcccaggctggagtgctggagtacagtggtgcaatctcagctcactgcaacctccacctcccgagttcaagcaattctcctgcctctgcctcccaagtagccgtgactacaggggtatgccgccacacctggctaatttcttttgtattttagtagagacagggtttcaccatgttgcccaggctggtctcaaactcctgagctcaggcaatctgcccgcctctgcctcccaaactgctaggattacaggcgtgagccaccgtacccggccacccttgggttacttgagaccctactttcatttggatctgagctgtcctacccactcactgcaatctggcttttccttctttgagtataaagtcgatacgggatggctcgcctacagcttcagtgtttgaagtaaagaaagctttatgcagattctggcttttaatgggtctcctctgacagtagaaagattcaaaccacagccaattccaagaacccttctaagaacagagacagagtcacttcaaaggatctgacttgctatacctaaatataattcatggtgcttttcctatgacacaccataatattttgtccaaaaatcttgcaacatgttattaactttgaagaaagaataaaagcagccactttagagactggagacactcaagcactcatctattcataaagtttctacacagctgaagaagtttgcatcaagtggacaaaaaatagtacagaaaacctaaatacagaaaaattcagaaaactccatctcctagaaagcagggcaaggctgggcacggtggctcactcctgtaatcccagcactttgggaggcctaggtgggtggatcatttgaggtcaggagttggagaccagcctggccaacatggtggaacccgtctctactaaaaatacaaaaattagccaggcgtggtggcacatgcctgtaatcccagctactcaggaggctgaggcaggagaactgcttgaacccgggaggcggaggttgcagtgagccgagatcgcaccactgcactccatcctgggcgaaagagcaagactttatctcaaaaaaaaaaaaaaaaaaaagaaagcaagttaaatggactcagttaaagacctcactgaatgtaggagaatcaatgggaaacaacgtaaagccttctgctagggcataaataggaatccgtctatgtaatcaagaaattactttgcctcctgatctaaatgcttgcctctagtctagggcttagaaaaaggcctggttatttgaactggttgtcaatcaaggtccccttcattttcgctttcttggcttccaattcagcctagaaagaaaaaaaaagcatatgtcttgatacatgacatgaaattattttccttccttattctaaccaacccaaacactctcccttaatgttcatttagtgtacaaactagaatcatggttcccaaatcattatatacctctaacatctactttccaacctttctgatgttatagcacatacacaaaaaatgctatttgtaggcaaaatgggcaaaaagacaaggctgtggccacaggaaatcagcgcagggattccagcagccccagcgccccccacaggctgagggaaccaatactgtggcataccagtatgctattcttggcagaacaggaagaacatcattctacaacagtgctacttaaagttatatggtctatgaactatttgttattggtccacacaaaatatgtacaaaaatggatagtaagcatttagaagcttttatagcaatttgacacaatagtaatttttaaaatctgataaaaattgagacaattcatttttattgtattttataaattacaaatctgttcatggaaatttgaaaaaaggaaagcactggtctttctgcctttgaaaggttgagaagcactgttctaaacgactatggcaaggtaaagcagctcccaggacccaccacttctgtcaccaaaaactcactacagacacaaagagactggtatacctttggatgagacaccaacatagtgatatctgattttgatgaaatattttaagtaattgtcaaaaaaaaatacataggcaccatcatacacagatccatatgctctaagatgagcccatgaatagtgcagaaaaccaccagtgctttaagaagcaatgaccagccccaatcctggtactaccaaggtagccctatcatgtgccattacatcctgggacaacgtccagaaaccctgacctttaactcctgatcttggaccacaagaagcagattaaaatatcatcctggcctggcgtggtggctcacgcctgaaatcccagtactttgggagcccgaggcgggcagatcacctgaggtcaggagttcgagaccagcctggccaacatggtgaaaccccatctctactaaaaatacaaaaattagccaggtgtggtggcacgtgcctgtagtcccagctactcaggaggctgaggcaggagaatcccttgaacccgggaggcggaggttgcagtgagctgagaccacgccacggcactccagcctgggcgacaaagtgagattccagctccaaaataaataaataaataaaataaaaataaaatacagaaaataaaatatcatcctagttagggctataacaagtatcatcatttaaggcctagatcctggggtcactactacagagtagggtatactgacagtcacagaccagggttataaaactggcagccaactactctaaaacctcccaacagatttcctaaaagatttccctgcctgctgaaaggtctttcagaccaagacatccaaatgatagggccccagcaccttgctaccccttgctactcaccagctcttgcagtcgcctcttgctcatgcctttgcgctccagctgtttttcaatcactttggcattctgtgcatatgagtcagcaacttccctctgaaggaaaaaaggagcatccttaaaccggaagtctcaccaaggaataacaacaaagacgttaagtcataatgtatactactcaaatcatgaaatcatgactaaaatggcaggactctgttccttttccattctccatcttttcagtaatccaggagcacttagggtattttgtttgattgcttgtttgtttgtttgttttgagacagagactgactctgttgcccaggctggagtgcagtagcacaatcttggctcactgcaacctccacctcccgggttcaagtgattcttcagtagcatttacgttttaaccaaaacatatgtaaaacagcagatgacatcttgccatcaatatcgttatactgaagaaccataaaggtaattgctactactactgaggacagactcacaaaccacgagttgggctggaaggaaactgaaatctttcagtccagtagtttctcaaattaagagggatgagcactttgccctctaaggcatctctaaaaatagcatggaggaaaaaatcactgatctcattcaacatccaactccttcgttttcattttacagatgtccctgagattcaaggaaacaggaactggctcactgtcagagtttcttttcttttcttttttttttttttttttttttttttttttgagacagagacccgctctgtccccaggctggagtgcactggcgcaatctcggttcactgaagcctccacctcccgggttcaagcgattctcatgcctcagcctcccgagtagctgggattacaggcgcgcaccaacacgcccggctaattttttgtatttttagtagaaacggggtttcaccatgttggccaggctggtcttgatctcctgaccttatgatccgcccgtctcggtctcccaaactgctgggattacaggcgtgagccaccacacccagcccatagtttcttatcagcagagcagggtctaaaagtgaagtctctaatatttccactactccaaggctcccgctctagagtcccctttcctcgtacccttctccccaaattccagtttccttaagaccagagacacttacagcctcaatctcctcttcctcttcatcaatggtagacacggtgacagaactgaacttgcccatgtctttggtccgtttggtcatcatcacctggagtggcaggcaagaagaagtcagtccggttcaccaaaacaggatccatgagccgtgagtgtgtgcgcacacgcctgtgtgaggggctgtgggtattgggggaaacactacctctttgggacaggatgacctatttaaaagtgccaatgtttttatttacatatttttctaacatttgccatcaaaggctcttatttttttttaatttactttatttttttgaaatagcatctcactctgctgcccaggctggaatacagtggcacaatcatagctcactgcaacctcaaactcctgggctcaagtgatcttcctgcctcaacctcccacgtagctaggattacaggcatatgcccccacgcctggctaattttacatttttgtagagactgggtctcgcaaaaaaaaaaaaaaaaaaaaaaaaaaaagaaggacagaaggtataaaaaagcatccttaacgcttaatgtctcaggcttgtatccaactcctggcctcaggcaatcctcctgccttggcctcccaaagtgctaggattacaggcgagagacactatgcatggtccatcatgggttcttaaaatttatttttaattacttttttttttttgagatggagtctcactattgttgcccagcctgaagtgcaatggtgcaatcttggctccgtaacctctgcctcctgggttcaagcgattctcctgcctcagcctcctgagtagctgggattacaggcatgcaccaccatgcccagctaattttgtatttttagtagagacggggtttctccatgtttgtcgggccggtctcgaactcctgacctcaggtgatccgcccacctcggcctcccaaagtgctgggattacaggagtgagccactgcacccggccaattaattttttttaagagacagggtcttactgtcacccaggctggagtgcagtggcacaatcatagctgactgtaacctcaaactcctgggctaaagtgatcctcccgcctcagtctcctgaatagctagaactataggtgaataccatcacacccagccaatttacttttttttgtagagatagggtctcgccgtgctgcccaggctggtctcaaactcctggcctcaagtgatcctcccacttctgcctcccaaagtgctgggattacaggcatgagccaccatgcccagcttggaatatattttttaattagcctaattcattgtttttaattgttcaaaaaaaaatttgtaaaataacacatgatatctctccataaaaagaagaaaatttgaaggaaattaatgtgagtaaaaaccatacaatttctaaccttagtcatgaggcaactgtaggaaagagagaacacataacaggtgttacaattacatagcatctgtttatacacaaaaatggcacccgattaataaagaatgcatccatacacatgcttgaggggatgaataccccattttccatgatgtgattacacattgcatacctgtatcaaaatatctcatgtaccccataaatatgtgcatctatataccccccaaatcgtttttaacttttaaaaaataaaaataaagtataagaatatatccataaagaaaaaagaaataaaataagaaaaagacaaaaaaagaaaaagaaataaaaagaatacatccataaagagcagtttctcatcactataatcttatttcaaaacatgagctaaatctagagctatattaagcagtctctccttcaatggtaattaccttcttaggaggctcttgtttctgagtatatatgttcgttttcccaaagccctggccaaacttgactactgctccatccacaatgaaggtaacaggagcattctttggctgggattggtagaagagcggcagtccacacctgcaatgacacagtgaatttctgcgaggtctcataatccaaattcccaaaacagcaatttgcaaagtgtgcttagactctgggaatatttctgtttgtggcataaactaatgactggctcttctcagtgtctcccaaaactacctctacctgataagaatcacttaggccgggcgtggtggctcacgcctgtaatctcagcactttgggaggccgaggcaggtggatcacctgagatcaggagttcaagaccagcctggccaacatggcaaaaccccatctctactcaaaatacaaaaattagccaggcatggtggcaggtgcctgtaatcccagctactcgggaggttgacacaggagaactgcttgaacccgggaggtggaggttgcagtgagtggagatcatgccactgcactccagcctgggcaacaagagcaagactctgtctcaaaaaaaaaaattcatttttctggccagctggtcaaagatacaactttgactagcctctttggggaacatattggtatttgtgcatagttgaagtctgaaggcagttgataaggataaagacataatgggggtcggacgaggtggctcaggcctgtaatcccagcagttttggaggctgaggtgggcggatgaactcaggtcaggagttcgagaccagcctgaccaacatgttgaaaccctgtctctactaaaatacaaaaattagccaggcatggtggcatgtgcctgtaatcccagctactagagaggctgaggcaggagaatcgcttaaacccaggaggcagaggttaaggtgacctgagattgcaccactgcactccagcctgggcgacagagcaagactctgtctcaaaaaaaaaaaaaaagacataatggagagttgtatccaaataattattttcctaacacattatgcctctacttgcctatgcttggagaaacccacattgttaatacttactttgcacatttcttcctgtactgtcgttcaatgccttcaggtctgcacagaaaatggaagttaaaaagatatgaacaaatctcattatgtatcaaccttactatcccatttcttcaaacgctaagaggccctttcaaaagttttcatttgggggccgggcacggtggctcacgcctgtaatcccagcactctgggaggctgaggcgggcggatcacctgaggtcaggagttcgagaccagcctcaacatggggaaaccccgtctctactaaaaatacaaaattagccgggcgcagtggtgcatgcctataatctcagctactcgggaggctgaggcaggagaattgcttgaacctgggaggcggaggttgcggtgagccgagagcgagccattgcactccagcctgggcaacaagagtgaaactccgtctcaaaaaaaaaaaaaaaaaaaagttttcatttcataggtcaactcattggttcaacattcctcccttcctgcaacaaacatttatggagcccctgatacaggtcaggtatctccctgacaaaggaagaggaagaggaggagcagtgtagtcataatcataggtagcaatagtagttgtagtaataacaacaacaataatagcggcaaccacttataaaccctttactatgtgccaagagctattctaaagtatacatgtattaactcggctgggcacggtggctcacgcctgcaatcctagcactttgggaggcccaggtgggtggatcatttgaggtaaggagttcgagactatcctggccaacatggggaaactccgtctctactaaaaatataaaaattagctgggcgtggtggcggatgcctgtaatcccagctactcaggaggctgaggcaggagaatcacctgaacctggaaggcagaggctgcagtgagccgagttcacgccactgcactccagcctgggtgacggaacgagactccatctcaaaaaaaaaaaaaaaaagtatacatgtattaactcatttaatccttacaacaactctgtgaggtatgtcatattattattcccactttatgaatgaagaacctaggcccacagagtattacatggcttgcccaaagtcgtggagctaggaagcagaggttgaatttaagcccaggcagtcaagctcaagagcccacacaataccaccttagacaccaagtcatatacacaaggactcaattccacccacacggctgtttaacagaaacctgggactcatccttgattcttctcttcccctcatctcccacacttacttcatcagcaaattctatggatttttatctccaagaaaagaccttgaatctgtctgcttgtctccacgttcctgccactatcttagcctacaccaccattatcaactccctggacgactgtaacaaacggtcctgactggtctcttcacttcccctccccttgtttcaactttgtaataggcaatatatgcatatggtatacataagagtataaaacaaaaaatatcttccctactcatcctccacccacccagttcccttccccagaggcaaatactgtttctggtttcttctgttcatcctagagatagctgatgcatatataagcaaagaactctgactggtacataaagaaaatatttttttccttttttagacaaatgtacgctgttctctacttttgttcacttaaaaatataacttggttaaatatatatatatattccatatcaatagataaagagttacttcattctttacaaggaccgcattgtattcctttgtatagataaaccaaaatgtcttttacgtgttggacaaattcctagaagtgtgtacattttaaattctggtagatgctgccaaatttctctctatagaagttgaaccaatttagactcacactaccaatatactgagagttcctgtttccctacagtctcaccaacactggatgccgttaaattgcatcactgccattctcacatgtgaaaaatggaatcttttaatttgaatttctttttttaggagtaaagttacacatcttttcatatatttaatagtcatttgcattttctttgttttgaactgttagttcatgtcctttgtttattcagttaccttttaattttatattaaggaaacttgcaataattaaggggccttgtttattctctagtttgtcatttgtctttgactttttccaccatgtggaaattttaggtttttctgtggtcaaaccaatcttcttttctcacataataattcatacaattcaatagcaaataaataaataacctgattttttaaatgggcaatggacctgaacagacatttctccaagacatacaaatggccaacaggtatatgaaaagactaatcatcagggaaatgcaaatcaataccataatgagggccggacgtggtagctcatacctgtaatgccagcactttgggaggccgaggcgggcagattacttgaggccagcagttcaagaccagcctggccaacatggtaaaaccccatctctactaaaaatacaaaaattagctgggtgttgtgacacatgcctgtaatcccagctacttgggaggctgacacaggagaatcgcttgaacctgggaggcagaggttgcagtgagccaagattgcgtcactgcactccagcctggacaacagagcaagaccctgtctcaaacaaacaaacaaacaaacaaaaaaaccataatgagatatcctctcattccagttagaatggctgttatcaaaaagacaaggctaggtgcagtggctcacgcctgtaatcccagcactgtgggaggccgaggcaggcggatcacgaaggtcaggagatcgagaccatcctggccaacatggtgaaaccccatctctactaagatacaaaaaattagccaggcatggtggcatgcgcctgtagtcccagctactagggaggatgaggcaggggaatcacttgaacccgggaggtagaggttgcagtgaaccgagattgcaccactgcactccagcctggtgacagagtaagactctgtctcaaaaaaaaaaaaaaaaaaaaaaaagacaaaaattaaatgttagggaggatgtggagaaaagggaacccttatatactgctagtgaaaatgtaaattagtacagccattatggaacacagtatgggagattcctcagaaaattatagaactaccctatgatccagcaatcccacttcttggtatatatccaaaggaaatgagttcagtatctcaaagagatatgtgcactctcatgctcattgcagcattattcacaacagccaagatatggaagcaacctaaatgtctatcaatggctaaatggataaagaaaaggtggcacgcacgcacacatgcacacacaacagaacattattcagccttatgaaaagaaggaaatcctgccatttgtgataatatggatggacttggaggacattatgctaaatgaaataagccaaacacagaaagacaaatactacatgatc

SEQ ID NO: 647 - DNA, 4257 bp, Homo sapiens
agcgggcggggcggagcgcgaggaggtggagccgcgggctgcgggctccggcgcctgcgtccgcccggccagcccggctctgcgctgcgagaggccggacggcagtcgcggctgcgctcgggagagagcgcgggggacatggggcgcggcggcccgcctgggcctcgcaggctccggagccccgagtgagcgagagcgtccccagccgcctacctggccatggccaacggagtgatcccgccgcccgggggcgcctcccccctaccccaggtccgggtgcccttggaggagccccctctaagtccagacgtggaggaggaggacgatgacttgggcaagaccttggctgtgagcaggtttggggacctcatcagcaagcccccggcctgggaccccgagaagcccagccgcagctacagcgagcgggactttgagtttcaccggcacacatcccaccacacccaccacccgctctcagcgcgcctgcctccaccccacaagctgcggcggctgccccccacctctgcccggcacaccaggagaaagaggaagaaggagaaaacctctgctcctccctccgaggggacccctcccatccaggaggaggggggagctggagtggatgaggaagaggaggaagaggaggaagaggaaggagaatctgaggcagaacctgtggagccccccccctcagggaccccacagaaggcaaagttctccattggaagtgacgaggatgacagtccaggcctccctgggagggctgctgtcaccaagcccctgccctcggtgggcccacacactgacaagagcccccagcactccagcaggccgtgctctgagctgagggacggtgatggaaccaccgacctggccctgtcaagtccaaggctgctgtgttgcctccccagctcccccagcccccgggcccgggcctcccgactcgctggggagaaaagccggccctggagcccatcggccagttatgacctgcgggagcgactgtgcccaggcagtgccctgggcaacccaggtggtccagagcagcaggtgcccacagatgaggcggaggcccagatgctgggttctgcagacctggacgacatgaagagtcaccgactggaggacaaccctggtgtgcggcgacacttagtgaaaaagccctcccggacgcagggcgggaggggcagtcccagcggcctggcccccatccttcgcaggaagaagaagaagaaaaagctggaccggaggcctcatgaggtgttcgtggagctgaacgagctgatgctggaccgcagccaggagccccactggcgggagacggcccgctggatcaagtttgaggaggacgtggaggaggagacggagcgctgggggaagccccatgttgcctcgctctccttccgtagccttctggagctcaggaggaccatcgcccatggagctgccctcctggacctggagcaaaccaccctgccaggcattgcacacctcgtggtggagaccatgattgtgtctgaccagatccggccggaggacagggccagcgtcctacgtaccctgctactgaagcacagccatcccaacgatgacaaggacagtggcttctttccccgaaacccatcgagctccagcatgaactcggttctggggaatcatcacccaactcccagccatggccctgatggggcggtgcctaccatggctgatgacctgggggagccagccccactctggccacatgaccctgacgccaaggagaagcccctccacatgcctgggggagatggtcaccgggggaaaagcctgaagctgctggagaagatccctgaagatgctgaggccacggttgtgcttgtgggttgtgtgcctttcttggagcagcctgcagcagccttcgtgcgtctgaatgaggctgtactcctggagtctgtgcttgaggtccctgtcccggtccgcttcctcttcgtgatgctggggcccagccacaccagcactgactatcacgagcttgggcgctccattgccacccttatgtctgacaagctgtttcatgaggctgcctacaaggcagatgaccggcaagacctcctaagtgccatcagcgagttcctggatggcagcattgtgatccccccgtccgaggtggagggccgtgacctgctgcgctccgtggctgctttccagcgagagctgcttaggaagcggcgagagcgtgaacagaccaaagtcgagatgaccacacggggtggctacacggcccctgggaaagaactgtctttggagttggggggctctgaggcgacccctgaagatgaccccttgctgcggacgggctcggtatttggggggcttgtgcgggatgtgaggcgccggtacccgcactaccccagtgacctgcgagatgcgctgcactcccagtgtgtggccgctgtgctcttcatctacttcgcagccctcagccctgccatcaccttcggggggctgctgggagagaagaccgaggggctgatgggcgtgtccgagctgatcgtgtccaccgctgtgctcggcgtcctcttctctctgctgggagctcagccgctgcttgtggttggcttctctgggccgctgcttgtgtttgaggaagccttcttcaagttctgccgagcccaggacctggagtacctcactggccgggtgtgggttggtctctggctggtggtcttcgtccttgccctggtggccgccgaaggcagcttcctggtccgctacatctcgcctttcacccaggagatctttgcctttctcatctcactcattttcatctacgagaccttctacaagctctacaaggtgttcacagagcgcccactgctgccgttctacccccctgagggggccctggaggggtccctggatgctggtctggagccaaatggcagtgccctgccccccaccgagggcccccccagcccgaggaaccagcccaatacggcactgctctcactcatcctcatgctcgggaccttcttcatagccttcttcctgcgcaagttcaggaacagccgcttcctggggggcaaggctcgtcgcatcatcggggactttggcatccccatctccatcctggtgatggtcctggtggattactccatcacagacacctacacgcagaagctgacagtgcctacagggctctcagtgacctctcccgataagcgctcgtggttcatcccacccctgggcagtgcccgtcctttcccgccgtggatgatggtggcagccgctgttcccgccctcctcgtcctcatcctgatcttcatggagacacagatcacggcgcttatagtcagccagaaggcgcggaggctgctcaagggctccggtttccacctggacctgctcctcattggctccctgggggggctctgtgggctgtttgggttgccctggctcacggctgccacggtccgctccatcacccatgtcaatgcgttgacagtgatgcgtactgccatcgcgcctggtgacaagccccagatccaggaggtgcgggagcagcgggtcactggtgtgctcatcgccagcctcgtgggcctgtccatcgtcatgggggctgtgctgcgtcggatcccattggctgtgctctttgggatcttcctgtacatgggggtcacgtccctgtctggtatccagctgtcccagcgtttgttgctcatcctcatgccggcaaaacaccatcctgagcagccctatgtgaccaaggtgaagacgtggcggatgcatctgttcacctgcatccagctgggctgcatcgcactgctctgggtggtcaagtccacggcggcctcactcgcctttcccttcctgctgctgctcacggtgcctctgaggcattgccttctgccccggctcttccaggacagggagctgcaggcgctggactcggaagatgctgaaccaaacttcgatgaggatggccaggatgagtacaatgagctgcacatgccagtgtgacccttgaagacagtgcccctcagagaccccaagaccttagggattgacacctgggcctcaggcagagcccaaccctgggctggggggctcctcaggacccagagatgtgcctggaaccactcctgatgccatggctagagtggcccccctgacttctgcccggggtgttgacctcgcctcacctttcacagaccagaccggcacaggctttgagctcattataaccacactccttgtctcgtaaaaaaaaaaaaaaaa

SEQ ID NO: 648 - DNA, 939 bp, Homo sapiens
  misc_feature (607)..(607): n is a, c, g, or t
  misc_feature (634)..(634): n is a, c, g, or t
gcatagtcctgttccactccggccttcctagcggcccccgcgtctgccgcgcagccgccgctccatccccagccccggccccgcatccaggtgaggcggccgcgcgccggggatggggaacgggatgaggatggagaggggactggggcgcacaggagggagctggggaaggggatggaaaatggagggagacccgggggatgcgcgtcagtgtgcaccccgagtatgtgagtatgctccggtgtatgcagctgcccgggcagttgtgagaacgtgtgtccgcgcccgatgtgggtccgggtactcgtgcgcgtcggagctctgcgtgtcctgtgtgtgcacgtgagcgttgtccgtggtgtatgtttgtgtgcaatgaccgtgtgactgtgccgtgcgtgtacaggcgggtcctggatattcgcgccgaacccagcactccggttcactggggctgcagtttgcaggcccggataaccgaggcagtggccctcccgcgtccccaggtttcaaggacgctaggactctccgcggccctggaggttcgcactggggagtggggtgagatggggggaaagcgggagggggctcagggtccagaagggcnccgcggtctcgggagtaggggggcatntgcgtcccgcgggaggggctggggtgagagtgcggggccagtgcaccggtgcccgtgtatcgccctccccaggccgccaggatggacgtgttcatgaagggcctgtccatggccaaggagggcgttgtggcagccgcggagaaaaccaagcagggggtcaccgaggcggcggagaagaccaaggagggcgtcctttacgtcggtgggcaaggggcggggtttctggggctgcagggctgggggtccccctacagtgtggagctggggccgggtcccggggaggggggttctgggcaagataatat

SEQ ID NO: 649 - DNA, 800 bp, Homo sapiens
gccagcctaggccgaacttccggctctcactgctaggggcttaagcggagggagtcgagccagcgtcgccgcgatggtgttgttggagagcgagcagttcctgacggagctgaccagacttttccagaagtgccggacgtcgggcagcgtctatatcaccttgaagaagtatgacggtcgaaccaaacccattccaaagaaaggtactgtggagggctttgagcccgcagacaacaagtgtctgttacgagctaccgatgggaagaagaagatcagcactgtggtgagctccaaggaagtgaataagtttcagatggcttattcaaacctccttagagctaacatggatgggctgaagaagagagacaaaaagaacaaaactaagaagaccaaagcagcagcagcagcagcagcagcagcacctgccgcagcagcaacagcagcaacaacagcagcagcaacagcagcaacagcagcacagtaaagggcatacatttcctgctttcaccaattgaccactgaattgctattttttccttttggccagatagctaggtttctggttcccccacagtaggtgttttcacataagattagggtccttttggaaagaatagttgcagtgtttataggatagttgtggtaagaatctagtttattttgcatttggctaattggcctgtgctgcatggttatatactcctggattatagattaaaagtctctgtagacatctctgtgaagagcaagctatcattaaacatgtctgtttatcaaaaaaaaaaaaaaaaaaaaaaaaa

SEQ ID NO: 650 - DNA, 1817 bp, Homo sapiens
gttttccagcccggccttcgcccgcccgctagcacgcagtcccttggtctcttcggtctcctgccgcccccgggaagcgcgctgcgctgccgaggcgagctaagcgcccgctcgccatggggagccccgcacatcggcccgcgctgctgctgctgctgccgcctctgctgctgctgctgctgcgcgtcccgcccagccgcagcttcccagataccccgtggtgctcccccatcaaggtgaagtatggggatgtgtactgcagggcccctcaaggaggatactacaaaacagccctgggaaccaggtgcgacattcgctgccagaagggctacgagctgcatggctcttccctactgatctgccagtcaaacaaacgatggtctgacaaggtcatctgcaaacaaaagcgatgtcctacccttgccatgccagcaaatggagggtttaagtgtgtagatggtgcctactttaactcccggtgtgagtattattgttcaccaggatacacgttgaaaggggagcggaccgtcacatgtatggacaacaaggcctggagcggccggccagcctcctgtgtggatatggaacctcctagaatcaagtgcccaagtgtgaaggaacgcattgcagaacccaacaaactgacagtccgggtgtcctgggagacacccgaaggaagagacacagcagatggaattcttactgatgtcattctaaaaggcctccccccaggctccaactttccagaaggagaccacaagatccagtacacagtccatgacagagctgagaataagggcacttgcaaatttcgagttaaagtaagagtcaaacgctgtggcaaactcaatgccccagagaatggttacatgaagtgctccagcgacggtgataattatggagccacctgtgagttctcctgcatcggcggctatgagctccagggtagccctgcccgagtatgtcaatccaacctggcttggtctggcacggagcccacctgtgcagccatgaacgtcaatgtgggtgtcagaacggcagctgcacttctggatcagttttatgagaaaaggagactcctcattgtgtccacacccacagcccgaaacctcctttaccggctccagctaggaatgctgcagcaagcacagtgtggccttgatcttcgacacatcaccgtggtggagctggtgggtgtgttcccgactctcattggcaggataggagcaaagattatgcctccagccctagcgctgcagctcaggctgttgctgcgaatcccactctactccttcagtatggtgctagtggataagcatggcatggacaaagagcgctatgtctccctggtgatgcctgtggccctgttcaacctgattgacacttttcccttgagaaaagaagagatggtcctacaagccgaaatgagccagacctgtaacacctgacatgatggttcctctcttggcaattcctcttcattgtctacatagtgacatgcacacgggaaagccttaaaaatatccttgatgtacagattttatttgtaattttaaaagtctattttattatgagctttctttgcacttaaaaattagcatgctgctttttgtacttggaagtgtttcaaaaaattatatgaccatatttactctttctaactttctttactccatcatggctggttgattttgtagagaaattagaacccataaccatacacaggctatcaacatgttattcaatgtgacacctaactcttttctattttgttttttaagtaagacttttattaataaaacaaaatgttttggagc

SEQ ID NO: 651 - DNA, 4221 bp, Homo sapiens
cagcccgagcccgagcccgagcccgagccggcgccaccgcgcccccggccatggcttttgccaatttccgccgcatcctgcgcctgtctaccttcgagaagagaaagtcccgcgaatatgagcacgtccgccgcgacctggaccccaacgaggtgtgggagatcgtgggcgagctgggcgacggcgccttcggcaaggtttacaaggccaagaataaggagacgggtgctttggctgcggccaaagtcattgaaaccaagagtgaggaggagctggaggactacatcgtggagattgagatcctggccacctgcgaccacccctacattgtgaagctcctgggagcctactatcacgacgggaagctgtggatcatgattgagttctgtccagggggagccgtggacgccatcatgctggagctggacagaggcctcacggagccccagatacaggtggtttgccgccagatgctagaagccctcaacttcctgcacagcaagaggatcatccaccgagatctgaaagctggcaacgtgctgatgaccctcgagggagacatcaggctggctgactttggtgtgtctgccaagaatctgaagactctacagaaacgagattccttcatcggcacgccttactggatggcccccgaggtggtcatgtgtgagaccatgaaagacacgccctacgactacaaagccgacatctggtccctgggcatcacgctgattgagatggcccagatcgagccgccacaccacgagctcaaccccatgcgggtcctgctaaagatcgccaagtcagaccctcccacgctgctcacgccctccaagtggtctgtagagttccgtgacttcctgaagatagccctggataagaacccagaaacccgacccagtgccgcgcagctgctggagcatcccttcgtcagcagcatcaccagtaacaaggctctgcgggagctggtggctgaggccaaggccgaggtgatggaagagatcgaagacggccgggatgagggggaagaggaggacgccgtggatgccgcctccaccctggagaaccatactcagaactcctctgaggtgagtccgccaagcctcaatgctgacaagcctctcgaggagtcaccttccaccccgctggcacccagccagtctcaggacagtgtgaatgagccctgcagccagccctctggggacagatccctccaaaccaccagtcccccagtcgtggcccctggaaatgagaacggcctggcagtgcctgtgcccctgcggaagtcccgacccgtgtcaatggatgccagaattcaggtagcccaggagaagcaagttgctgagcagggtggggacctcagcccagcagccaacagatctcaaaaggccagccagagccggcccaacagcagcgccctggagaccttgggtggggagaagctggccaatggcagcctggagccacctgcccaggcagctccagggccttccaagagggactcggactgcagcagcctctgcacctctgagagcatggactatggtaccaatctctccactgacctgtcgctgaacaaagagatgggctctctgtccatcaaggacccgaaactgtacaaaaaaaccctcaagcggacacgcaaatttgtggtggatggtgtggaggtgagcatcaccacctccaagatcatcagcgaagatgagaagaaggatgaggagatgagatttctcaggcgccaggaactccgagagcttcggctgctccagaaagaagagcatcggaaccagacccagctgagtaacaagcatgagctgcagctggagcaaatgcataaacgttttgaacaggaaatcaacgccaagaagaagttctttgacacggaattagagaacctggagcgtcagcaaaagcagcaagtggagaagatggagcaagaccatgccgtgcgccgccgggaggaggccaggcggatccgcctggagcaggatcgggactacaccaggttccaagagcagctcaaactgatgaagaaagaggtgaagaacgaggtggagaagctcccccgacagcagcggaaggaaagcatgaagcagaagatggaggagcacacgcagaaaaagcagcttcttgaccgggactttgtagccaagcagaaggaggacctggagctggccatgaagaggctcaccaccgacaacaggcgggagatctgtgacaaggagcgcgagtgcctcatgaagaagcaggagctccttcgagaccgggaagcagccctgtgggagatggaagagcaccagctgcaggagaggcaccagctggtgaagcagcagctcaaagaccagtacttcctccagcggcacgagctgctgcgcaagcatgagaaggagcgggagcagatgcagcgctacaaccagcgcatgatagagcagctgaaggtgcggcagcaacaggaaaaggcgcggctgcccaagatccagaggagtgagggcaagacgcgcatggccatgtacaagaagagcctccacatcaacggcgggggcagcgcagctgagcagcgtgagaagatcaagcagttctcccagcaggaggagaagaggcagaagtcggagcggctgcagcaacagcagaaacacgagaaccagatgcgggacatgctggcgcagtgtgagagcaacatgagcgagctgcagcagctgcagaatgaaaagtgccacctcctggtagagcacgaaacccagaaactgaaggccctggatgagagccataaccagaacctgaaggaatggcgggacaagcttcggccgcgcaagaaggctctggaagaggatctgaaccagaagaagcgggagcaggagatgttcttcaagctgagcgaggaggcggagtgcccaaacccctccaccccaagcaaggccgccaagttcttcccctacagttctgcggatgcttcttaacaaccgcccggggctgtggctggcagcttggtgggccccagggccttctccttcattctctgtgaacatgtaactcaggaccccttttccctcttgcgtctgtgccagctcaaatccagcccctcgccctgtgccaccccaactgtgcctgatagacctgccccagcgttcctgacttcttgctggcctgtggagggtgaggtgtaattatttgtcacctgaacctaatgtatattctccttgagccccagatcccttcaagctggaagggatggggctgttggtggggtcagggtccaagaggaatgggtgttctgtggcctcgagtcctctcctgtttgcgaaaataccagttttgctctctgtgggacaaagcactgctgatgaagtccccgtgggctcatccgggctggaattcttggtttttcagccattccctgcagagtcactcaatcatcaagtccctcacagccatttctgttcccagaggagccaggcctgcagctggctgctcaggagatggcctcattcctcctgttctcccagtttgctttccacttaagacaaagccttgtctatgtggggggcggggaccggggaaagagggaggctgaaatgtttattctgcttctcccgtgtttcatgccatctcgcgtcccccttcctgcacatgggtgtgaatgcacacacatacgcgtacacacaggacttggtctgctggcctggcctcttctgcccaggtgggttggaacacgtttgctgcctgagcctgtgccactgagcatgttaggtggagcagttggtgtggcacgtgcggggtgttggcaccggaggcatggaaaagcacaggctgtactgccaggctgcgatgcgtgctggcccccgcacaggctcctgtgtgcagggactgattcctcagcacacgaggcttccacaacccagtctgctccatagcactctggcccaccctgtctgcaggtgaaacaggagggctgtttgcctctgccccatccccccgactgtgttcaggagtcccaccttgcatttcagacctgggctggcagtctgttggacttctcttcaggaagaaaaagcatcagggggaaatggaatgcccctgccccaggaacatggcagaagcacaggttctgtacctcagatggactcctgctgggccttcggggtctcagttggcttcccccagattctgattctacagctgcagaatgtatataacacaataaaagcaaatgtttgaaccagt

SEQ ID NO: 652 - DNA, 3593 bp, Homo sapiens
ctcggccccgggctgccgcgccagcccgtctccgcggcgggggaccgggctgccttggcccctcagcgctcgcgtcttttccggcagttggaacgcttcctgttgtcctcacccgtaaccgcctgttgccccctgtctcagagtccctcacgcgtcccctcccgtctttggctcgttggctgccgccgccggggcttcgccagccttcaagtcgagactactggccgaaggggcgtctgcggctctccgccgtccccagccctgcctctccctgggctctgcagccatggcaatgacaggctcaacaccttgctcatccatgagtaaccacacaaaggaaagggtgacaatgaccaaagtgacactggagaatttttatagcaaccttatcgctcaacatgaagaacgagaaatgagacaaaagaagttagaaaaggtgatggaagaagaaggcctaaaagatgaggagaaacgactccggagatcagcacatgctcggaaggaaacagagtttcttcgtttgaagagaacaagacttggattggaagattttgagtccttaaaagtaataggcagaggagcatttggtgaggtacggcttgttcagaagaaagatacgggacatgtgtatgcaatgaaaatactccgtaaagcagatatgcttgaaaaagagcaggttggccacattcgtgcggagcgtgacattctagtggaggcagacagtttgtgggttgtgaaaatgttctatagttttcaggataagctaaacctctacctaatcatggagttcctgcctggaggggacatgatgaccttgttgatgaaaaaagacactctgacagaagaggagactcagttttatatagcagaaacagtattagccatagactctattcaccaacttggattcatccacagagacatcaaaccagacaaccttcttttggacagcaagggccatgtgaaactttctgactttggtctttgcacaggactgaaaaaagcacataggacagaattttataggaatctgaaccacagcctccccagtgatttcactttccagaacatgaattccaaaaggaaagcagaaacctggaaaagaaatagacgtcagctagccttctccacagtaggcactcctgactacattgctcctgaggtgttcatgcagaccgggtacaacaagctctgtgattggtggtcgcttggggtgatcatgtatgagatgctcatcggctacccacctttctgttctgagacccctcaagagacatataagaaggtgatgaactggaaagaaactttgacttttcctccagaagttcccatctctgagaaagccaaggatctaattttgaggttctgctgtgaatgggaacatagaattggagctcctggagttgaggaaataaaaagtaactctttttttgaaggcgttgactgggaacatatcagagagagacctgctgcaatatctattgaaatcaaaagcattgatgatacctcaaacttcgatgagtttccagaatctgatattcttaagccaacagtggccacaagtaatcatcctgagactgactacaagaacaaagactgggtcttcatcaattacacgtacaagcgctttgagggcctgactgcaaggggggcaataccttcctacatgaaagcagcaaaatagtactcttgccacggaatcctatgtggagcagagttctttgtataacatcatgcttttcctctcacactcttgaagagcttccaagaagttgatggaacccaccaatatgtcatagtaaagtctcctgaaatgtggtagtaagaggattttcttccataatgcatctgaaaaactgtaaacaaagacaaccatttctactacgtcggccataaacagctatcctgctttggaagagaagcatcatgagccaatttgataggtgttttaaaaataacttgagttttcctaagttcatcagaatgaaggggaaaaacagccatcatccaacattattgagattgtcgtgtatagtcatcgaatatcagccagttcctgtaattttgtgacacgctctctgccaagcccaccaagtatttcctttatagctaaaagttccatagtactaaggaaataaagcaataaagacagtctcagcagccaggattctggctgaaggaaatgatccgccaccctgagggtggtgatggtagtttctacccatacctcagcctcaggcgagtggcttatagcctccattcatggtgcactttatttatggtactaagataaagactgtcaatccattgatttatctcctcctgtcccccatctaaaatacccatgctgcttttctgagtgttgatgggggttaccagcttgatccactgttgctcttagaaggcccagaaagtctttgggcattgccaagaaatcccggattatgtggaaaaccctcactttctcttcacggctgtaccagaaaatccctaagacagatcttgccgtggactagcaatacctgcaagtgctgccaatgggaactcaatttattcctgggaacctaacgaggagagcccaggcctaggcaggaggcctggaaccctcttggctaaggtgctgttcctgttcctgcaaggtctccagaacccctttggaaatggtgaaggaaccagcccaatagaagtacagagccagctgacaagtccttgtaaagctcactcctcagtccttggcacagccatgttttgtcttctctcttggtatttcttctctcccaactttagccattttgccttggaatcatgattacaattttttcctttgcagatgccttcctgggggatactcctccccaccctaaagggtcgcctgcaacttaggcggattgggtctctctgctgtggcgttctctcttgagagaccctctgaattttagcacaaagtgccttctgtttcacagctgccaccacctttagaggaatttcgtcagaaaaatgtggaggctccatattaatgcattattttttaaaaagttttgataactcttaaagcatcatttgcacctatgtgggaactttgcctgttgcaaagtattgtggccgagctgcagctgggagcctgctttctgccagtcttgaggttctgaagatcagctttgaaaggaaagtatgtcctagcttagccattcagaagagaaaaatggaatatcagagttacagttgtcagtgaaactactttggattttaacctcttagaggaagaaaaaaggttagggaagtgtcaactctggatgaaggtgatgtgtttgcctctcagtctttcattcatagcctgctagtgaaaaggaagtaaatgagattcttttgtgtgactttgtagtctctttgtattaccaaatagttggggtgttgactcctgtgtgttttgcaagaatgtgtggtaagcctgggtaaagagaaggaactgcggtgttgggagagtctttgtgttggggagtggcaggggatgatttgtttcaggggaaaatgcccacattttaacttttaaacttctgaataaactgtgtaaaaacaaaaaaaaaaaaaaaaaa

SEQ ID NO: 653 - DNA, 1875 bp, Homo sapiens
ccgcgcatctgttacttgtagcagtgactatatttaaatcggggaggatggtgtggagggggcggggaggagaggagaatttttccaaaatctgacggaaagaaaagaaacaaatggttcagatgggacggagggtgggggagggggggagggtgagtaggaaccaggagggctgcctggggtgggggaataaattaaaaaaaggaacgagttaacaacagcaccaggaaagttacttcagtcaaaagacgcttttgaaaagaatatttctccgtacaaaatgagaaattaaacgaacgtaaagtcccccaaaccaaagtttgtgatgtgggatggttggctcggatcccgaggtgggtgggcctatgaggtggttgctaagtcgacgcaagggcggcgggggtggtctcagggatggacaaggggatggagtagagtatgtacagcccccggggctcacaggggagggggacggcggaggccaccgcgaattcgccgtccccccccatcgccccgtcacacagccgagtcaccttttccctttctacactccacactctcagtcccccaccccgcccctttccaagcgtgtcccgggccgcagcgcagaaaccgcaccatctccacccccacattctcctcgcgggaagcgcagcagtgcctccaagggttcttaaagcagagatgaataatacggcagctagtccaatgtctactgcaacttcaagtagtggaaggagtacagggaagtctataagctttgcaacagaattacagagtatgatgtattctttaggtgatgctagaagcctcttcatgagaacagcagttttggtagaagatgtggtacacactcagttaattaatctgttacagcaagctgctgaagtttctcagctgcggggagcaagggtaatcactcctgaagatcttctgtttttgatgcgcaaagataagaaaaaacttagaagactgctaaaatacatgtttatccgagactacaaatcaaagattgtcaaaggcatcgatgaggatgatcttctcgaagacaaattgagtggcagcaataatgcgaacaaaagacaaaagattgctcaggacttcctcaactctattgaccagacaggagaacttttagcaatgtttgaagatgacgaaattgatgaagttaaacaagaaagaatggagagagcagaaagacacaactcgattatggattcagctcaatatgcagaattctgtgaaagtcgacaattaagtttctccaaaaaagcttccaaatttcgagactggttggactgcagcagtatggagataaaacccaatgttgtcgcaatggaaatcttagcatatttagcgtatgaaactgtggcacagttagtggatctggctcttcttgtgaggcaagacatggtaaccaaggcaggggaccccttcagccatgccatttctgcaaccttcattcagtatcacaactctgctgagagcactgcagcctgtggtgttgaggctcacagcgatgccatccagccctgccacatcagagaggccattcgacgctacagccacaggattggcccactttccccattcacaaatgcctaccgcaggaatgggatggcttttctagcctgctgatgtgacaactgtgatgtgcctgcaacaacaggaaaggcaatgttatattaaggagtaaaccaagccaattcagcacttcctgtttacttccttgtcatatgtaccatagatggtgacagacctgctctcaaaacaagcttccttcgtttaattctgcattttctgcttaggcaaccaccctatcaatatacttgaacaatgaaacaatttggctacggaagcactgtctctgaattc

SEQ ID NO: 654 - DNA, 1780 bp, Homo sapiens
acacggcgtccctcaggcgcccccattccggaccagccctcgggagtcgccgacccggcctcccgcaaagacttttccccagacctcgggcgcaccccctgcacgccgccttcatccccggcctgtctcctgagcccccgcgcatcctagaccctttctcctccaggagacggatctctctccgacctgccacagatcccctattcaagaccacccaccttctggtaccagatcgcgcccatctaggttatttccgtgggatactgagacacccccggtccaagcctcccctccaccactgcgcccttctccctgaggacctcagctttccctcgaggccctcctaccttttgccgggagacccccagcccctgcaggggcggggcctccccaccacaccagccctgttcgcgctctcggcagtgccggggggcgccgcctcccccatgccgccctccgggctgcggctgctgctgctgctgctaccgctgctgtggctactggtgctgacgcctggccggccggccgcgggactatccacctgcaagactatcgacatggagctggtgaagcggaagcgcatcgaggccatccgcggccagatcctgtccaagctgcggctcgccagccccccgagccagggggaggtgccgcccggcccgctgcccgaggccgtgctcgccctgtacaacagcacccgcgaccgggtggccggggagagtgcagaaccggagcccgagcctgaggccgactactacgccaaggaggtcacccgcgtgctaatggtggaaacccacaacgaaatctatgacaagttcaagcagagtacacacagcatatatatgttcttcaacacatcagagctccgagaagcggtacctgaacccgtgttgctctcccgggcagagctgcgtctgctgaggctcaagttaaaagtggagcagcacgtggagctgtaccagaaatacagcaacaattcctggcgatacctcagcaaccggctgctggcacccagcgactcgccagagtggttatcttttgatgtcaccggagttgtgcggcagtggttgagccgtggaggggaaattgagggctttcgccttagcgcccactgctcctgtgacagcagggataacacactgcaagtggacatcaacgggttcactaccggccgccgaggtgacctggccaccattcatggcatgaaccggcctttcctgcttctcatggccaccccgctggagagggcccagcatctgcaaagctcccggcaccgccgagccctggacaccaactattgcttcagctccacggagaagaactgctgcgtgcggcagctgtacattgacttccgcaaggacctcggctggaagtggatccacgagcccaagggctaccatgccaacttctgcctcgggccctgcccctacatttggagcctggacacgcagtacagcaaggtcctggccctgtacaaccagcataacccgggcgcctcggcggcgccgtgctgcgtgccgcaggcgctggagccgctgcccatcgtgtactacgtgggccgcaagcccaaggtggagcagctgtccaacatgatcgtgcgctcctgcaagtgcagctgaggtcccgccccgccccgccccgccccggcaggcccggccccaccccgccccgcccccgctgccttgcccatgggggctgtatttaaggacacccgtgcccaagcccacctggggccccattaaagatggagagaggactgcgaaaaaaaaaaaaaaaaaaa

SEQ ID NO: 655 - DNA, 154 bp, Homo sapiens
tttttttttttttttttttttttttttttttataaatataaatttccatatgatttattgttgttccttgtacataaaaaacagtaatatacaacttacactgctttaaaatgtaaaatggataaaaatgtgtacaaaaaaaagcacattccta

SEQ ID NO: 656 - DNA, 865 bp, Homo sapiens
gcttttccgcccgctcccccctccccccgagcgccgctccggctgcaccgcgctcgctccgagtttcaggctcgtgctaagctagcgccgtcgtcgtctcccttcagtcgccatcatgattatctaccgggacctcatcagccacgatgagatgttctccgacatctacaagatccgggagatcgcggacgggttgtgcctggaggtggaggggaagatggtcagtaggacagaaggtaacattgatgactcgctcattggtggaaatgcctccgctgaaggccccgagggcgaaggtaccgaaagcacagtaatcactggtgtcgatattgtcatgaaccatcacctgcaggaaacaagtttcacaaaagaagcctacaagaagtacatcaaagattacatgaaatcaatcaaagggaaacttgaagaacagagaccagaaagagtaaaaccttttatgacaggggctgcagaacaaatcaagcacatccttgctaatttcaaaaactaccagttctttattggtgaaaacatgaatccagatggcatggttgctctattggactaccgtgaggatggtgtgaccccatatatgattttctttaaggatggtttagaaatggaaaaatgttaacaaatgtggcaattattttggatctatcacctgtcatcataactggcttctgcttgtcatccacacaacaccaggacttaagacaaatgggactgatgtcatcttgagctcttcatttattttgactgtgatttatttggagtggaggcattgtttttaagaaaaacatgtcatgtaggttgtctaaaaataaaatgcattttacctaaaaaaaaaaaaaaaaaaaaaaaa

SEQ ID NO: 657 - DNA, 420 bp, Homo sapiens
atggactggatttggaggatcctcttcttggtgggagcagcgacaggtgcccactcccaaatgcagctggtgcagtctgggcctgaggtgaagaagcctgggacctcagtgaaggtctcctgcaaggcttctggattcacctttactagctctgctgtgcagtgggtgcgacaggctcgtggacaacgccttgagtggataggatggatcgtcgttggcagtggtaacacaaactacgcacagaagttccaggaaagagtcaccattaccagggacatgtccacaagcacagcctacatggagctgagcagcctgagatccgaggacacggccgtgtattactgtgcggcagagggagagcagtggctggccaattttgactactggggccagggaaccctggtcaccgtctcctcaggg

SEQ ID NO: 658 - DNA, 4224 bp, Homo sapiens
gttcgagcttgtgttcccccggaagggtgagtctggacgcgggcgcggaaggagcgcggccggaggtcctcaggaagaagccgcggggactggctgcgcttgacaggctgcacttggatgggagcacctggtgcctcgggactgctccgatgcccgggtctgtgctgaatgtgtaatatgcggaactatattgaaacattacaaccatcttttgatggcaacaccctgaggacctcccttttccagatggggaaactgaggcccagaattgctaagtggcttgcttgagttgacacagggagctccaggactcaccctcagctgagccacctgccgggagcatgcctctgcgccactgggggatggccaggggcagtaagcccgttggggatggagcccagcccatggctgccatgggaggcctgaaggtgcttctgcactgggctggtccaggcggcggggagccctgggtcactttcagtgagtcatcgctgacagctgaggaagtctgcatccacattgcacataaagttggtatcactcctccttgcttcaatctctttgccctcttcgatgctcaggcccaagtctggttgcccccaaaccacatcctagagatccccagagatgcaagcctgatgctatatttccgcataaggttttatttccggaactggcatggcatgaatcctcgggaaccggctgtgtaccgttgtgggcccccaggaaccgaggcatcctcagatcagacagcacaggggatgcaactcctggacccagcctcatttgagtacctctttgagcagggcaagcatgagtttgtgaatgacgtggcatcactgtgggagctgtcgaccgaggaggagatccaccactttaagaatgagagcctgggcatggcctttctgcacctctgtcacctcgctctccgccatggcatccccctggaggaggtggccaagaagaccagcttcaaggactgcatcccgcgctccttccgccggcatatccggcagcacagcgccctgacccggctgcgccttcggaacgtcttccgcaggttcctgcgggacttccagccgggccgactctcccagcagatggtcatggtcaaatacctagccacactcgagcggctggcaccccgcttcggcacagagcgtgtgcccgtgtgccacctgaggctgctggcccaggccgagggggagccctgctacatccgggacagtggggtggcccctacagaccctggccctgagtctgctgctgggcccccaacccacgaggtgctggtgacaggcactggtggcatccagtggtggccagtagaggaggaggtgaacaaggaggagggttctagtggcagcagtggcaggaacccccaagccagcctgtttgggaagaaggccaaggctcacaaggcagtcggccagccggcagacaggccgcgggagccactgtgggcctacttctgtgacttccgggacatcacccacgtggtgctgaaagagcactgtgtcagcatccaccggcaggacaacaagtgcctggagctgagcttgccttcccgggctgcggcgctgtccttcgtgtcgctggtggacggctatttccgcctgacggccgactccagccactacctgtgccacgaggtggctcccccacggctggtgatgagcatccgggatgggatccacggacccctgctggagccatttgtgcaggccaagctgcggcccgaggacggcctgtacctcattcactggagcaccagccacccctaccgcctgatcctcacagtggcccagcgtagccaggcaccagacggcatgcagagcttgcggctccgaaagttccccattgagcagcaggacggggccttcgtgctggagggctggggccggtccttccccagcgttcgggaacttggggctgccttgcagggctgcttgctgagggccggggatgactgcttctctctgcgtcgctgttgcctgccccaaccaggagaaacctccaatctcatcatcatgcggggggctcgggccagccccaggacactcaacctcagccagctcagcttccaccgggttgaccagaaggagatcacccagctgtcccacttgggccagggcacaaggaccaacgtgtatgagggccgcctgcgagtggagggcagcggggaccctgaggagggcaagatggatgacgaggaccccctcgtgcctggcagggaccgtgggcaggagctacgagtggtgctcaaagtgctggaccctagtcaccatgacatcgccctggccttctacgagacagccagcctcatgagccaggtctcccacacgcacctggccttcgtgcatggcgtctgtgtgcgcggccctgaaaatatcatggtgacagagtacgtggagcacggacccctggatgtgtggctgcggagggagcggggccatgtgcccatggcttggaagatggtggtggcccagcagctggccagcgccctcagctacctggagaacaagaacctggttcatggtaatgtgtgtggccggaacatcctgctggcccggctggggttggcagagggcaccagccccttcatcaagctgagtgatcctggcgtgggcctgggcgccctctccagggaggagcgggtggagaggatcccctggctggcccccgaatgcctaccaggtggggccaacagcctaagcaccgccatggacaagtgggggtttggcgccaccctcctggagatctgctttgacggagaggcccctctgcagagccgcagtccctccgagaaggagcatttctaccagaggcagcaccggctgcccgagccctcctgcccacagctggccacactcaccagccagtgtctgacctatgagccaacccagaggccatcattccgcaccatcctgcgtgacctcacccggctgcagccccacaatcttgctgacgtcttgactgtgaacccggactcaccggcgtcggaccctacggttttccacaagcgctatttgaaaaagatccgagatctgggcgagggtcacttcggcaaggtcagcttgtactgctacgatccgaccaacgacggcactggcgagatggtggcggtgaaagccctcaaggcagactgcggcccccagcaccgctcgggctggaagcaggagattgacattctgcgcacgctctaccacgagcacatcatcaagtacaagggctgctgcgaggaccaaggcgagaagtcgctgcagctggtcatggagtacgtgcccctgggcagcctccgagactacctgccccggcacagcatcgggctggcccagctgctgctcttcgcccagcagatctgcgagggcatggcctatctgcactcgcagcactacatccaccgagacctagccgcgcgcaacgtgctgctggacaacgacaggctggtcaagatcggggactttggcctagccaaggccgtgcccgaaggccacgagtactaccgcgtgcgcgaggatggggacagccccgtgttctggtatgccccagagtgcctgaaggagtataagttctactatgcgtcagatgtctggtccttcggggtgaccctgtatgagctgctgacgcactgtgactccagccagagcccccccacgaaattccttgagctcataggcattgctcagggtcagatgacagttctgagactcactgagttgctggaacgaggggagaggctgccacggcccgacaaatgtccctgtgaggtctatcatctcatgaagaactgctgggagacagaggcgtcctttcgcccaaccttcgagaacctcatacccattctgaagacagtccatgagaagtaccaaggccaggccccttcagtgttcagcgtgtgctgaggcacaatggcagccctgcctgggaggactggaccaggcagtggctgcagagggagcctcctgctccctgctccaggatgaaaccaagagggggatgtcagcctcacccacaccgtgtgccttactcctgtctagagaccccacctctgtgaacttatttttctttcttggccgtgagcctaaccatgatcttgagggacccaacatttgtaggggcactaatccagcccttaaatcccccagcttccaaacttgaggcccaccatctccaccatctggtaataaactcatgttttctctgaaaaaaaaaaaaaaaaaa

SEQ ID NO: 659 - DNA, 2291 bp, Homo sapiens
  misc_feature (1836)..(1836): n is a, c, g, or t
ttgggcagtgcacccgtacctttgggagcgcgcgccctcgtccgtgtcgtgacgtcacccgttctgttggcttataatgcagggtggggcccactgcccggtaggtgtgcggtaggcttttctccgtcgcaggacgcagggttcgggcctagggtaggctctcctgaaatcgacaggcgccggacctctggtgaggggagggataagtgaggcgtccagtttctttggtcggttttatgtacctatcttcttaagtagctgaagctccggttttgaactatgcgctcggggttggcgagtgtgttttgtgaagttttttaggcaccttttgaaatgtaatcatttgggtcaatatgtaattttcagtgttagactagtaaattgtccgctaaattctggccgtttttggcttttttgttagacaatgcagatcttcgtgaagactctgactggtaagaccatcaccctcgaggttgagcccagtgacaccatcgagaatgtcaaggcaaagatccaagataaggaaggcatccctcctgaccagcagaggctgatctttgctggaaaacagctggaagatgggcgcaccctgtctgactacaacatccagaaagagtccaccctgcacctggtgctccgtctcagaggtgggatgcaaatcttcgtgaagacactcactggcaagaccatcacccttgaggtcgagcccagtgacaccatcgagaacgtcaaagcaaagatccaggacaaggaaggcattcctcctgaccagcagaggttgatctttgccggaaagcagctggaagatgggcgcaccctgtctgactacaacatccagaaagagtctaccctgcacctggtgctccgtctcagaggtgggatgcagatcttcgtgaagaccctgactggtaagaccatcaccctcgaggtggagcccagtgacaccatcgagaatgtcaaggcaaagatccaagataaggaaggcattcctcctgatcagcagaggttgatctttgccggaaaacagctggaagatggtcgtaccctgtctgactacaacatccagaaagagtccaccttgcacctggtactccgtctcagaggtgggatgcaaatcttcgtgaagacactcactggcaagaccatcacccttgaggtcgagcccagtgacactatcgagaacgtcaaagcaaagatccaagacaaggaaggcattcctcctgaccagcagaggttgatctttgccggaaagcagctggaagatgggcgcaccctgtctgactacaacatccagaaagagtctaccctgcacctggtgctccgtctcagaggtgggatgcagatcttcgtgaagaccctgactggtaagaccatcactctcgaagtggagccgagtgacaccattgagaatgtcaaggcaaagatccaagacaaggaaggcatccctcctgaccagcagaggttgatctttgccggaaaacagctggaagatggtcgtaccctgtctgactacaacatccagaaagagtccaccttgcacctggtgctccgtctcagaggtgggatgcagatcttcgtgaagaccctgactggtaagaccatcactctcgaggtggagccgagtgacaccattgagaatgtcaaggcaaagatccaagacaaggaaggcatccctcctgaccagcagaggttgatctttgctgggaaacagctggaagatggacgcaccctgtctgactacaacatccagaaagagtccaccctgcacctggtgctccgtcttagaggtgggatgcagatcttcgtgaagaccctgactggtaagaccatcactcncgaagtggagccgagtgacaccatcgagaatgtcaaggcaaagatccaagacaaggaaggcatccctcctgaccagcagaggttgatctttgccgggaaacagctggaagatggacgcaccctgtctgactacaacatccagaaagagtccaccctgcacctggtgctccgtctcagaggtgggatgcagatcttcgtgaagaccctgactggtaagaccatcaccctcgaggtggagcccagtgacaccatcgagaatgtcaaggcaaagatccaagataaggaaggcatccctcctgatcagcagaggttgatctttgctgggaaacagctggaagatggacgcaccctgtctgactacaacatccagaaagagtccactctgcacttggtcctgcgcttgagggggggtgtctaagtttccccttttaaggtttcaacaaatttcattgcac

SEQ ID NO: 660 - DNA, 4481 bp, Homo sapiens
ggaatttcccgcggagctgacagcgcttgcgctccccctactcgttctaattccacgcgctccaaaatatccgccatggagaaatcttggccaggatgtccattctaggcccatcggtgctgtcttgctgaaggttgggtcaggcatctaaagggactgtggtaagggagggtgtgacacaggtgtaagctgccatcgtcatcatgaactttgagggtctggaccctggactggcagaatatgccccagccatgcattctgccctggaccctgtcttggatgcccacctgaacccaagtctgctacagaatgtggagctggacccagagggagtggccttggaggctcttcccgtccaggaatcagtgcacataatggaaggtgtctactctgaattgcacagcgtggtggctgaagtgggtgtacctgtttccgtctcccactttgacttgcacgaggagatgctgtgggtggggagccacgggggccatgccacttcattttttggcccagccttggagcgctactcatcctttcaagtcaatggcagtgatgatattcggcagatccagagcctggagaatggtatcctttttctcaccaagaacaacctcaagtatatggcccgtgggggcctcattatatttgattacctgctggatgagaatgaggatatgcacagtctcctactgactgacagcagcactctactcgttggtgggctgcagaatcacatactagagattgatcttaacactgtccaggagactcagaagtatgcagtagagacgcctggagtcaccatcatgagacagacaaatcgcttcttcttctgcggccacacgtctggcaaggtttccctgagagacctccgtacttttaaggtggaacatgagtttgatgccttctcaggaagtctgtcagactttgatgtgcatggcaacctgctagctgcctgtggcttctccagccgcctcactggcctggcctgcgaccgtttcctcaaggtgtatgatttgcgcatgatgcgtgccatcacaccacttcaagtacatgtggatcctgccttcttgcgcttcattcctacatatacttctcgtcttgctatcatctctcagtcagggcagtgccaattctgtgaacccacaggcctggccaacccagccgatatctttcatgtgaatcctgtggggcctctgctaatgacatttgatgtgtcagccagcaagcaggctctggcctttggggattctgagggctgtgtgcacctctggactgattccccggagccttccttcaacccctactcccgtgagactgagtttgctttgccgtgtctcgtggactcactgcctcctctggactggagccaggacctgctgcctctttccctcatccctgtcccactcaccactgacacacttctctctgattggcctgctgccaactctgctccagctcccaggcgagcaccacccgtggatgcagagattctgcgcaccatgaagaaggtgggcttcattggctatgcgcccaatccccgcaccaggctgcgcaatcagataccctacagactcaaggagtcagacagtgaatttgacagcttcagccaggtcactgagtcaccagtaggacgagaagaggaaccacatctccacatggtttctaagaaataccgcaaggtgaccatcaaatattccaagctagggctggaggactttgacttcaaacactacaataagaccttgtttgctggattagagccccacattcccaacgcctactgtaactgcatgatccaggtgctctatttcctggagcctgtacgctgtctaattcaaaaccacctttgccagaaggagttctgtctggcatgtgagctgggcttcctgtttcacatgttggacctctctcgtggtgacccttgccagggcaataattttcttcgggcattccgtactattcctgaggcctcagccctcggtctaatcctggctgactcagatgaggcctcaggcaagggcaatctggccaggctcattcagaggtggaatcgcttcattctcactcaactgcatcaagatatgcaggagctggaaataccacaggcttatcgaggtgctggaggcagcttttgctcatcgggggactctgttattgggcagctcttcagctgtgagatggagaactgcagcctctgccgctgtggcagtgagaccgtgcgagcctcatccactctgcttttcacactctcctaccctgatggtagcaaaagtgataaaactgggaagaactatgactttgctcaggtgctgaagcgaagcatctgcctggaccagaatacacaggcctggtgtgacacctgtgaaaagtaccagcccacgattcagacccgcaacatccgccatctgccagatattcttgtcatcaattgtgaggtgaacagctcaaaagaggctgatttctggagaatgcaggctgaggttgccttcaagatggcagtaaagaaacacggtggggaaatctccaagaacaaggaatttgctttggctgattggaaggaactagggagtccagagggtgtgctggtgtgtccctccattgaggagttgaagaacgtctggcttcctttctccattcgcatgaagatgaccaaaaacaaagggctggatgtttgcaattggactgatggggatgagatgcagtggggcccagccagggcagaggaggagcatggtgtctatgtgtatgacctgatggctactgtggtacacatcctggactcacgcacagggggcagcctggtggctcacatcaaagttggagagacctaccaccagcgcaaggagggcgttactcaccagcagtggtatctgttcaatgactttcttattgaacctattgataagcatgaagctgtgcagtttgacatgaattggaaagtacctgcaatcctttattatgtcaaacggaatctcaattccagatacaacctgaacatcaagaaccctattgaggcaagtgtcttgctggctgaagcctcgctggcacggaagcagcggaaaacacatactacctttattccactgatgctgaatgagatgccacagattggggacctggtgggtctggatgctgagtttgtcacccttaatgaggaggaagcagagttacgcagtgatggtaccaagtctaccattaaaccaagccagatgtcagtagccaggattacctgtgttcggggccagggacccaatgagggtatccccttcattgatgactacatctctacccaggagcaggtggtggattacttgactcaatactcgggtataaagcctggtgacctcgatgccaaaatttcctccaagcacctaacaactctcaagtctacctacttaaagcttcgttttctcattgacattggagtcaagtttgtgggtcatggcctgcagaaggacttccgggtcatcaacctgatggtgcccaaggaccaagtccttgacactgtctacctgttccatatgccccgaaaacgaatgatttccctgcgattccttgcttggtactttctggacctgaagattcaaggggaaacccatgacagtattgaggatgcccgcacagcccttcagctgtaccgaaagtatctggagctaagcaaaaatggcactgagcctgagtctttccacaaggtgctcaagggtctttatgagaagggcagaaagatggactggaaggtgcctgagcctgagggccaaacaagtcccaagaatgcagctgtcttctcctcagtgctggcgctctgactacccttcccaaagaaccacggccctctccctttactgttctatagccccagaactgggagatggcttcctaagttggctataccttgtccacttccagtactggacgtgctcagggtctagggtcacagatggtgctattaattgaactggaacacagcagaattgttgcaaaggttctaggagccagattcattccttcttcattctttgcaaaacagtggtacagacatggagtctagaattgacccagatggaaagtaattggtattcttaatatcctgggtgactaatatccaggcagagaagctcctggaaccataactgtaagttcctagctggctagggattgaagtcctggacagtgacagaggataccacagtagttcaagacttagcacaagtcaccaactgcttcagggatacctggaggggccagcaagtagagtgttggtggcccaagcaaaccagtgttgccaataccattgccaaaagggcctttggatcctggacaaagcttggctgccggcttcatttattcctgctgatggctgagaagcatctgtcttccatcccacttgcctgtcccaagttttgttccattttttaaaaatttgttgtaaactgcatgttttataaaataaaaataaaatatcgtttgttatttatctc

SEQ ID NO: 661 - DNA, 1797 bp, Homo sapiens
gtgagcctgccgttgctacataaccgcgtagtttgagccatttctgcgtctggcgggtccttctgaacttgtcaccttcgcttggggtcgcaacgacccgatgatcgatgatccaagcaagggaaaagaagccttggcggagagcggaggtttggtgggggcggggaatggggtttttttcccgtccacggaagctttctgggatgggggtgctgtgctcgcatcccgggggttggaattggcggggtcctctgtgccctgctgtgagcgtttccaggactttgacctcgctcagcctgcctctctccaccctacctgtgcgaccgctttctcgcagtgtgacgtggagtgttactcaatgtccttatactttccattgctgtttttggtaatggggacattagaaccatcctagtagaatcgtttttgggaactgaaagagataacgcaaatgagaaccttaaagcagtccctgtcacttggtgactggtggtctcttgttaacttcccgaagaggtcaggtccccgggtggagtcatagcttcagctgcaggggccctggtccttctccctaatccctgcaggacgctggatgatcccgggaggccttctgacctctttttaggaaagcgagttgcgtccgcttccacgaagggcggggagcatttaacttttatgggggaccgcgatgcagtcagggtatttcacaactttcgccttccccagcctgacctttctaaaagagctgcagggaggggacttcttggctactgagggcaaatctctatgtgattggtccttggcttttttcctttatagagatgttcacccaaccgagagtgtgtcctcgggaatgggtgttgataatcattaagccgtaattggtaacttcattctaagtgctttatacaaataaatttaggccacactgtggctctgtgaagtattgcttttctttgttttaaaaatgagagtgagacacagggtgcatagcagccaactagtgagaggtagagctggggttggcacctaggcagtccaggtcagagcctgagttgatcacctcttggatacattctcattgaggcagaggaactagctggactcgtagggaaagcaagttaggacctgattgaaaggacgttgagagcaaggctcgtgggcttggacgtctaggaatttttaaaaatttctcaactattttgtttcatgttttccaagtatttcgtactgttgtggaactgtatcattgtggaaaagtctgaaataggagaaatgagagtagaaaaagttttttaattacccatgtatccaagatgtaaaggtagtaactgttaagcttctaattgatttcttttgtctttctttgtgtctacttctatatttgttgataaacatttttttaaaaattgttatattttaatgtgttttcccatatgtcttttaactatagaaaattttaaatattgctaatagagactaaactagtgaggctggttgtggtggctcatgcctataatcccagcactttgggaggccaaggcaggtggatcacttgaggtcagtagtttgagaccagcctggccaacatggtgaaaccccatctctaccaaaaatacaaatattagccgggcgtgatggcacgtgcctgtagtcccagctactctagaggctgaggcaggagaattgcttaaacccgggaggtggaggttgcagtgagccaagatcacgccactgcactccagcctgggcaacagagtgagacgcaaaaaaaaaaaaaaaaaaaaaaaaaaaaaa

SEQ ID NO: 662 - DNA, 2871 bp, Homo sapiens
gatctcagataggagagacagtctgtaaatataacgaatgtggaagaaccttcattgaaagtttaaagctgaatatatctcaaagacctcatttggaaatggagccgtatggatgcagtatttgcgggaagtccttctgcatgaatttaaggtttggacatcagagagctcttacaaaggacaatccttatgaatataatgaatatggggaaatcttctgtgacaattcagctttcattatccatcagggagcttacacaagaaagattctccgtgaatataaagtgagtgacaaaacctgggaaaagtcagctctcttaaaacatcaaatagtacacatggggggaaagtcttatgattacaatgaaaatgggagtaatttcagcaagaagtcacatcttacccagcttcggagagctcacacaggagaaaaaacctttgaatgtggtgaatgtgggaaaaccttctgggagaagtcaaacctcactcaacatcagagaacacacacaggagagaagccctatgaatgtactgaatgtgggaaagccttttgccagaaaccacacctgaccaaccatcagcgaacacatacaggagaaaaaccctatgaatgtaagcaatgtggaaaaacattctgtgtgaagtcaaacctcactgaacatcagagaacacacacaggggagaagccctatgaatgtaatgcatgtgggaaatccttctgccacagatcagccctcactgtgcatcagagaacacacacaggggagaaaccgtttatatgtaatgaatgtggaaaatccttctgtgtgaagtcaaacctcattgtacatcaaagaactcacactggggagaaaccatataagtgtaatgaatgtgggaaaaccttctgtgaaaaatcagctctcactaaacatcagaggactcacacaggggagaagccgtatgagtgtaatgcatgtgggaagacctttagtcagaggtcagtgctcaccaaacatcagagaattcacacaagggtgaaagctctttcaacatcctgaatgttagaagccttcatacacttgtgaaattggttatacagtttcaaaaaaggagatcagagaaagccaaagaatgtcagaaatttgtagaaaatgacttcttgtttgaatatgtaaaagctttcaagaaaaattaaaacttttcattagaaaatttgtactgaggggaattctattcatctaagtaatatggtgaaaatatttatctggaatttatgttgtttagtgttatattccagacgtgataccaaaattttgttgcaaatataatggacaatatttatttatacccatattcacagtggaatctgaagcttataaaagttgaatgacagcagcattaaacatatatgtgaagagtccccgatgtttgtagaccttatgtgagtatgcaaatatataaatttgagtatgcttgatttgtatattggaactcaacatgatcataaggagaagatacgtacccttaattgagtaactactatggtatttgttaatattttctacactaaataccattggtgtctttataggttgacataattatatatgtgtatgtacatatgtttgtgtgtatatgtaaatatatttctacacacatacttaaatatagtgatgtgctagtataacctcatactgacttaaaagttctgattgttaaattttaaggaattttgtgagccagttattaaaagcagtcattatttaaaatatgtaaacttacagttaaaaacaaaggtaataaatactcagcactcatcacttcctaattattttgctacatttcactattacctttgctgttttacttatttaatctgtatgatgaaaatactgtataatagtgtgcactgcacatctgtctcttcccagctccacattcagtgctgtcttggtagcttggacttagtgggagtgtttacaccatggaaattgacaaactataaatcagggttttaattttctcagagaacctgctgtcaaatatttacagcacatcactgtgtatatatgaaaacgtatttggcaatacaaaccacataccccttctatttcctgacataaataaatggctatggccatttacagctgaaccacgtcttcaagaaagaagccaaaaatatttccgtgaggtttttaactacctctgaatctgtcctactctaaatactaccggagtctctttgtaggttggccagtatatgtttttagtgaaatattatttcacaaagaactatatcacgtacctttcctctgactgtttcctggcatatatgcatgaatatggccattattgaactatcacttcagtaaagaagttaaacagtacttttctgaggtttttcagctacctctgggtcattctgtaatgtaaatgttgttaataagaatggtttttacataaattatgcaaaggttaacaagcagtaacactgcactcctcaaaaagtggcggtatgtaatgaaaggcccttttgatatccttgatttttcattgtgtatctgtttgggcacggtctatgtaacactagttctgcgtattagtattttagagtatctctgcctcccttgtcctgttgtttcttttgcccccttggaacacattggtcagcagttctaagagacactgcccacatgatggccattccctacttcatccttgctgagctaaattttatatttttgtgcatccttctcccagatgacttaggtggtaagtccagattagtcaaagctaatcatggaagttccattttaatgattctgttggggtgaacttgggagcaatgagatgtttgggaagtattgtgtagtacttctgggaaagatc

SEQ ID NO: 663 - DNA, 102 bp, Homo sapiens
agcgggagagtgacccagtcagcgttggttcccgtcttggccatggcctcgttcgtgacagaagtttggcacactccgggaggctggaaaaggaggatctgg

SEQ ID NO: 664 - DNA, 152811 bp, Homo sapiens
gatcaggcagagagagctttctccagactaattacactgagatacgtgttgatgaatctgagaagacaaccaagtccttttctgcaggcccagtgatgtcacagggtccctcagttacagatctggaaatgccacattattctacctttgcctacttcccaactgaggtaacacctcatgcttttaccccatcctccagacaacaggatttggtctccacggtcaacgtggtatactcgcagacaacccaaccggtatacaatggtgagacacctcttcaaccttcctacagtagtgaagtctttcctctagtcacccctttgttgcttgacaatcagatcctcaacactacccctgctgcttcaagtagtgattcggccttgcatgctacgcctgtatttcccagtgtcgatgtgtcatttgaatccatcctgtcttcctatgatggtgcacctttgcttccattttcctctgcttccttcagtagtgaattgtttcgccatctgcatacagtttctcaaatccttccacaagttacttcagctaccgagagtgataaggtgcccttgcatgcttctctgccagtggctgggggtgatttgctattagagcccagccttgctcagtattctgatgtgctgtccactactcatgctgcttcagagacgctggaatttggtagtgaatctggtgttctttataaaacgcttatgttttctcaagttgaaccacccagcagtgatgccatgatgcatgcacgttcttcagggcctgaaccttcttatgccttgtctgataatgagggctcccaacacatcttcactgtttcttacagttctgcaatacctgtgcatgattctgtgggtgtaacttatcagggttccttatttagcggccctagccatataccaatacctaagtcttcgttaataaccccaactgcatcattactgcagcctactcatgccctctctggtgatggggaatggtctggagcctcttctgatagtgaatttcttttacctgacacagatgggctgacagcccttaacatttcttcacctgtttctgtagctgaatttacatatacaacatctgtgtttggtgatgataataaggcgctttctaaaagtgaaataatatatggaaatgagactgaactgcaaattccttctttcaatgagatggtttacccttctgaaagcacagtcatgcccaacatgtatgataatgtaaataagttgaatgcgtctttacaagaaacctctgtttccatttctagcaccaagggcatgtttccagggtcccttgctcataccaccactaaggtttttgatcatgagattagtcaagttccagaaaataacttttcagttcaacctacacatactgtctctcaagcatctggtgacacttcgcttaaacctgtgcttagtgcaaactcagagccagcatcctctgaccctgcttctagtgaaatgttatctccttcaactcagctcttattttatgagacctcagcttcttttagtactgaagtattgctacaaccttcctttcaggcttctgatgttgacaccttgcttaaaactgttcttccagctgtgcccagtgatccaatattggttgaaacccccaaagttgataaaattagttctacaatgttgcatctcattgtatcaaattctgcttcaagtgaaaacatgctgcactctacatctgtaccagtttttgatgtgtcgcctacttctcatatgcactctgcttcacttcaaggtttgaccatttcctatgcaagtgagaaatatgaaccagttttgttaaaaagtgaaagttcccaccaagtggtaccttctttgtacagtaatgatgagttgttccaaacggccaatttggagattaaccaggcccatcccccaaaaggaaggcatgtatttgctacacctgttttatcaattgatgaaccattaaatacactaataaataagcttatacattccgatgaaattttaacctccaccaaaagttctgttactggtaaggtatttgctggtattccaacagttgcttctgatacatttgtatctactgatcattctgttcctataggaaatgggcatgttgccattacagctgtttctccccacagagatggttctgtaacctcaacaaagttgctgtttccttctaaggcaacttctgagctgagtcatagtgccaaatctgatgccggtttagtgggtggtggtgaagatggtgacactgatgatgatggtgatgatgatgatgatgacagaggtagtgatggcttatccattcataagtgtatgtcatgctcatcctatagagaatcacaggaaaaggtaatgaatgattcagacacccacgaaaacagtcttatggatcagaataatccaatctcatactcactatctgagaattctgaagaagataatagagtcacaagtgtatcctcagacagtcaaactggtatggacagaagtcctggtaaatcaccatcagcaaatgggctatcccaaaagcacaatgatggaaaagaggaaaatgacattcagactggtagtgctctgcttcctctcagccctgaatctaaagcatgggcagttctgacaagtgatgaagaaagtggatcagggcaaggtacctcagatagccttaatgagaatgagacttccacagatttcagttttgcagacactaatgaaaaagatgctgatgggatcctggcagcaggtgactcagaaataactcctggattcccacagtccccaacatcatctgttactagcgagaactcagaagtgttccacgtttcagaggcaggttagttacggatcagaaggacagattgaggtgtggtggtttgcttgctctaaaagtaaaatgaaaattatagaaagatagaaatttggtaaaatggtacatcatcatttttaaaatcaaaacattcaacaaatcagtctccagtttctgaagtataattttatttattatttcaaacaattatttaacacattttggtttttaatttaattctctccaaaatagacaaaacaatttttatttattgtcaatatttcatactctacaggatgtcttttatgggtgggggcaattctgtttgcataatacatttttagtacactgcttttaaagcaagatcagagtatgctattttagatgattttaattttcatacttttgttctaaaataagttgtaaactaattctatttaattataaaatgaattattaaatctgagagtaatgtgacataagcacttctctctgacacacccctgtagaaaggaattagttaatttccacattcatatcagcttggggagctttatttattattattatttaattaattaattaattaattttgagacggagtctcgctctgtcgcccaggctggagtgcagtggtgcaatctcggcttactacaagctccgcctcccaggttcacgccattctcctgcctcagcctcccgagtagctgagactacaggcgcccaccaccacgccaggctaattttgtgtatttttagtaaagacggggtttcaccatgttagccaggatggtcttgatctcctgacctcgtgatccacccgcctcggcctcccaaaatgttgggattacaggcgtgagccactgcaccaggccagggaggtatttatgtatttatttatttatttagttttattactaagttttgagagttaataatgaagttaaaaaaaattttaatttttttgtctttctttatcttaatgttgcctaaagagggcagtgtaaaccatcaaaatacattttactttatgcctgctgttacacacttttttaagttaaataatgggcattaatatgtacagtatgtataggtattgtatcacaagatgtaaaacactaaacatttttctgtagaaatgaatttcatttgtgaatgtattttatgcaaattagcttactgaccagatgtttcttagagcagattatgtgcagtgtttataatacagatgtctgctttaaatgccaatggaaagaagagggaagttcaatcctattaagtatagaaaagtaatactttcattgaattggtcataagaattttataatttgcttttattaaatgtgaacgtatcttaaagtttaataatgaaactatttaaatcttaacatcaagttaaatgataggctaatgtaacaaaatgcactcattgtataaaagtgaatatttgtaatccagaacatagacatcagtctcattagaatatttttcctctttgcgatttcatctttttaattagttgtatattttttcttcagtgcagcagcaattaaaagtttgtacattttgatagaaaactttttctgtattctgaattgatacctatttaacattgcattttaaacacttaaatgctgatatgtgagaatgaataatgaatccataggtcactatagtcattagtgctgtcatatatatgaactgttatctgttctcaattatagtagctgctttttagttttcattagatttatgttaaaagaaaatatcaggaatccatctatctgtcttaccaggtagtgacattgatacgttcttgctagactatgctattatagaaggatatatataatgagatgctaaacctaaaattattgactaaagcttagcaaatttctcttcagtgcactaattagttttatttaattatcaagagtgtgttctcccactaattaggataaaacaatatgaatatgacatccaacattatcaagtaacataattagtgaagtaaataagatcaaacaagattaggggaaaattctggcctatttttaaaactgtatctataaaatcatatgtaatctgtcttatccaataattgaatatatccctttatcaaatgcatgcagactagctctgaaacttaagattttatggtgtatttctagaatgcagaacaatttacaggatgtgttctttaaaatactatagataaggcaaatattagtatccacaatttataaatgagtacactgacacccaaagatactagattatttgatccaggtcacatgagtaaatacaaaactgagcctggaaatgtctatctcttaaagattatgctttcatgttaggggccaattaaataaatgtaatgcttaaattgtaataccaaaattatactatcttattctcaaaacatcttttaaaatgttaatcttagttttttatttcttaattacctattaattaaatattttaatttaggtaactcatatatactactgagccatctcaaggagatattttagtctcaaataaataaaaataaaatcagtaaaattaattcctcattatagtacacaaagcaaccaactgattgtctgtgctttcataagatatcctattttgtgtaaaagagctaggtttcatgccatagtttgatcattctgactccttaattaaaggatttaagatcaaatatcccagagcacttttgagaaaagtttatacacaagactatatgtgtgtgcatgtgtgtatacagtgtctgtatataaatatgtgtatatggtatatttacatatataatgcattatatatcttacatatatgacatatatgataggacatatctcatatatatgtatgctatacatatataaatgaaatatgtaattatatatatatatacccatatacatgttgctttgaaaatttgtggctattgaagacctgcataattatataagcttacttcgtacatatattaatctacatcactggttctcaaactttaacatagatcaaaatcaactggaggactcgtcaaaacacaaattgctgacccttacacacagagtttctggttcagaagattttgtatggtttgagcgaagcctaaaatttgcatttctaagttatgatgatgttgatgctgctattctggggatcaaacgtcaagaaaatctgatatagataataatattaaccaccatttgtactaaatgaggtaccaaggactttgctaagtgaatgttttcatttattactgacacacttactttccatctaggtaacaatagttacaatagaaaaaactgtgaagacaaccatgtataaaataagatgtttttctaaattttataaggaaatgctcattgcattcaccatcaggttatttaggtgactagatgattctaaatgagtctccacaaaataatggccagagcttaggattaacattttaaaaaatggagtcttgggcttttctcacaagaatattagctacaactcagggctgagttggcttagaacattttcactttttatacagttttatgatttttaatcacacctttgaattccatttttcctagtaaatgcatttatagttataagaccaaacatcttgggaagtgtgtgtgccatttatattcctgtgatacattacatttatttatttatttatttatttatttatttatttattttgagatagagtctcactctgttgcccaggctgtagtgcagtggcgtgatctcagctcactgcaacctctacttcccgggttcaggccattctcctgactcagcttcccaagtagctgggattacaagtgtgcaccaccacgcctggctaatttttgtattttttattttttttagtagagatggggtttcaccatgttggccaggctggtcttgaactcctgacctcaagtgatccgcctgcctcagcctctcaaagtgctgggattacaggcatgagccaccacgcccagcctgatacattccctttattaatggattaaattcctgtccctttctgctatcacccttgatcaacagaagaaagctattattttaaatcttaagttctctccaattagatatattttaatgctatatatgtgcacttatattagtctcaattttcttaaatacatatttaagttaagtgaagtttctctgtctcctattacttaagcatcagaagtgccaagtgcataagaaggcatgtagattttgatgggaaactcaaatgtggttctttcagaatgtctgcaggtagatataagggctttttgtagcactgtcagcatgctgtaatgttagaaaccgttctcatgctcagtcatcttggtttcccactgaacacacctcaaagcaaagaggaaggattgttattggccacaaacactcactgttctgaaactctttttttaacaacttggaaggtaatctctagttaaagtgattttcaaagtgctagtacagtaatgtacctgactggcccccaaaataatcatgtgtcatcttttaaaattaactcaaggaccaaattcggatttttaattatttacacttgcatatttcagaagaatttcttagatctacatattcctccaattcacctgaaattgcatttttttttttttgtagaataaaacaatgggtaagaagaacattcaaaataacatttaaaaccaatctatatttaaaattgaaatcgattactggattgaaaggttatcctaatataagaagagttatcccaagatttttttcttcatgaaattattaattgcttctaactatttacctaatgcagggttaaaaataatcctatttaaatttattttagaaaattaatatatatggtgattcagtaagtagcgctgtttttcctgaccattctattttaaatcagtagtgatttttaaattacactactttgatttttcttatttagcaaggcttttcaaggcaatattatgcttacctgttgccaaggcacccctatctgggtgccaatctctgctgggatgttgtagttcttcttgtctaatagcctgccttacattttaaactttgttttaattaaattggcttataattgtagacattctttgcatcaaagagtcaaaattttaaaggtaagtaacagcaatgaaggttgcaattaatcagttgaaaaatgctgtgacttttccttcaccttaaatatcaattctctcaattttctctgactacagaggccagtaatagtagccatgagtctcgtattggtctagctgaggggttggaatccgagaagaaggcagttataccccttgtgatcgtgtcagccctgacttttatctgtctagtggttcttgtgggtattctcatctactggaggtaagttgagtatttgttttggaaaatttaattcataaaactcagattttgcccatatttcatctgaaaggtcttcaaagcatattcaaaatgtattttacctgagagctgccattaatttattcaaggtaaatttgtgaatccaaaggcacaataatgaaggagttaattgttcttcatacatcaattaaagataaaatggagaaacttttacccgttactatttaacacagtattttgacagttgtactttcatgttaatctaattaatagatatcatcatagcatttaacataagtctaagcttctcgttagttgttataattccaaaaattaagaaaacattttttatataataacaagtattgtttttcaatgacagaagagtttgtacaagatgtgtattaactgcacatactgataaaaatgataacctgtgcataaaagtaaaatcaagcaattaaactataaatataattagagactacagctaatgactatcttaagatgcacaggcatttaagatacatataatttgctttggggatgaaatatagcttcgctgtcaataatctattaagtccctaaagacaagaataattgtacccatcataaaatttccatcctgtggaaagcagaacacacagcaaattagtgtatttatgaggaacataggtcagtataactgtgtctgttagaaaacaaaggctttatgatgatataaggaatcatatgtgtaaaccaagaaagggcatagcatagtacttttataaagtatagcatacttttattttaaaaaagaattttgttcagaagatacataatttttttgtttagcaacatcattctgtaactttgtatcagcactctttatgtgttctctcaaaatatattctcgtgtttttttctgaaatatttaccattgttattgattgtttcccacatacctagtactgtgttaaccatcaggaaatatcaaaaatgaacaaatgaatgaaaaaagagtcagtgatttgaagaaatatatgcttattgagggggaagaatttgttataaaaatgtataaaatattacacaaaagtgtatgcgtagcagttgaaatctagtgctaaaagtagtcagagaacaaagaagcttggtaggccagaatgctcagggcaagtgtaaactaaaatgtaggactcaagctctgtgggagtcagaaaggaaaggaaaagggcattccaggcagggacacagcaggtgcaaagatcgggaagtagaaatgagctgtcttttgagtaaaagctattggatgtttcggacacagtgaggtctggagcatgtattaatagttgcatgtagttggacattggttggctagggtagaatgtcttcatgatcaactgtatttcatatctgacttcctttactagaacagagtagactgcacactatggagaacagatcatgcttttgttaccccacatgggtcaggagtctattttgttataataagaaacaaacaaacctggtttctttagtctgtatcccggtgattccaataattgccaaagattcttttttttttttgctaaagggttcatgcttagcagagtgctttgaacctaatccataatccataaatgtgtgttcaacaaaaataaatattgcttttctccccgttccccactgaacttgttgaccaaattttttaccacattgatatgtgtattcagattacaggtttctatctaatctgattttccctaccaaactacctttttaattaatgggagtcagtgttaagaattgaaaataagatggagaatatgaccaattctgcttcatagtaaatagtgctagtacaaagttccaataaagatgtcagatggtttataattataagattgaaattcgtttcttaatctgtgttacttttcaagtatattttctgaaaatttggaaatcagtatcttatttaatacaatttgatatttcatggaaaattaaaatttagagaggtttctatcttctattaataatgtgtcatttcatctgcattatatggggaaaagataaaattaccagtcaaaaatatattaatttgaccttcaataagatatttcttttttcttcacaaataacactttaggtaccttgaatgcagagtgtcatagtgtaaaatatatatgagtattttggccaggcacagtggctcacacctgtaatcccagcaatttgcaaaggtgaagtaagtagatcacttgaggccgtgagtttgagaccagcccaggaaacatagtgagacctccatctctacaaaaacaataaaaataaacaatttagctgggcatggtagggcatgtcatactcccagcttcccaggaggctgaggctggaggatcacttgagcccaggagtcaaggttacagtgagctgtgattatgccactgcactccagcctgggcgacaaagtaagacactgtctcaaaaaaaaaatcactttgatggttttatgtatatgttttatatctattaaatgttctgataaaaattgtcaatctttacttattttgaaatgttaagtagtgttagatatctgacctactaacatctgtttgaagttaattcactaaaaaatataaattttcatatcatcatatgctaggggtattatgtgctgaatcacaagatgatagttttagttaattcttcaaggtttatgtgaattattcaaattccagtgaagctacatttgtaaacaatatgatttcactagccaatatataaacattttagacctttgtaaaagctacagcttgagaaaaggtttaaaaatctaatgtcgtaccaataacagtcctaatggtaatgaagtccttaagaatttttccaagtttatatatttaaacttttttaaacagcttaattaggtaatattgaaatatcataaaactcacctttttaaagtgtatgattcaatggtttttaaagtgttctactatttccataatgactaatgatgttaagtgttttttcatgtgcttgttggacagttgtatatctttttttgataaatgtgtattcaaatcctttgctgcctattttttaattgggttatttgtctttctattattgagttgtggttttgtttgtttgttttgttttaaggagcagagagtttaataggtaagaaagatgggagaaggcagaaggaagaagctccccgtacagagacagagggagggggcctccaaagctgaaagaggagaacctgagttgtgtgtttttatatattctagatacaagtcccttatcagatatctgatttgcaattattttttcccattctgtgagttatcttctcactttcatgatggtatcttttttaaagtagaaaagtttttaattttgatgaggccaaattcatctattttttctcttattgcttgcaccttcagtatcatatctaagaaggcattgcctaacccagcaccacatggatttactcctagatttttgtctaagaatttaacaaaattaaaggactcatgcttcccagttgcaaaactttaattgaaagctacaggaatcaagagagtctggtactgccataagaatagacatatagatcaatggaatcgaactgagaacccagaaatcttatgtttacgatcagtggattttagacaaggatccaaagacttttcaatgggcaaagaatagtccttccaacagatggtgctaggacaattgaatattcacatacaaaaagtcaaattaaacctttttctaacactatacacaaaaatgaactcatagggaccatagacatcagtgtaagaactataaaattcttagaagaaaatatttaagtatgtttctaacctattttaatgagaaattaatctcaaagttttataataaatctgctatttcacctaatttacctaactcaagatattccccttattttttgtataaactttcagaggaagcagattttagccaaaagacagaacaaattcaaagtgagaaaatccagatctctttcctagttctgcccggcatttgctatatggccttgggcatgtcaattacccacctaggacttggtttctcctgtttaccatttgggtaggttcactagatcatctttaagattgtagccagcgaggcatggtggctcatgcctgtaatcccaaaactttgggatttatatatatatataattttatatataattatatatatgtataattttatatataattatatatatataattttatatataattatatatattatatgtataattttatatataattatatatattatatgtataattttatatataattatatatattatatgtataattttatatataattatatatattatatgtataattttatatataattttatatattatatgtataattttatatataattatatatattatatgtataattttatatataattatatatataatgtataattttatatataatatatattatatgtataattttatatataattatatattatatgtataattttatatataattatatatatataaaaaaaaaaaagattgtagccagacccaggaatagaataatacacatttctaggttttcattataaatactgtgatgaaaaggcgtaaaccaaataatcagattaccattgattgataggacctatgtctacaagtttaagacagtcatcacttttttcatcatgcctgatggataattagcaggtgacgtagttatcaacacttagcacatagacgtgaagacattcactgcttatactgaacagatggactacagatactgaatcttgtcatacattaaataatatgccttgaaatcattttccagatgttttatggtataatttacatgggccataccataagtttctaagatgcaaaaatgacttcaacagggaagattttcaaaagtttttttttttttaaggcaaatttttgaaagcttttttaagagttggaacctaaaaagtaccaaaggtatacccaaccaaatggcacactatcaaaagcaatatagaaaaggacttcacataaacacaattgttttggctgggggtagggagatgaaaagcaatatgaattctctcttgatcttaaacttgaatttgtggatcattgaagatgtctactaacccagaatggaggtcttctggtaccagattgccttttaagtgtagtgtcacttgctatataaaactgcactacaaagtatacctaaccaatatgcaaatgaccttcatccataatttagcctatactattttaattttttttttttacttacaagctttttggtattatttataaggtcttttagggaaattaatgccaaatagggttattgggctacttattttctagaaccaacaaagatttgattacagatttgtttatttgtttgtgacaagagtagaattggtgtttacccacactactgtgaacactagcaacatattcaacctcaatgccaacatgttttaatttaccattttatattctatgagatgctgccttcttcccattcagtcatagttattggtacatcctctatcgatccatctgcccatccagccacccattcgtccatccttctctacctatatatcttatctctccttccaaaatgttttgagatttcaagttatcccaattgaggctaaggtaggtaagggaatccaggatgcagctgaacaacatatgattggtgggatttacttgctattagaaatccatctaatcattcaacaaatattgaacacctattctactcctggcacagtattaagagttgggtttacataaaatcaagagatacggccccatcttttaaaaatgtaataaagatataagcacaaaacaaatataatacaaaacaattacactaaccaccaattaagaaaaatacttaaaataaataatgtagaataatgtccaggaaatgaagattactcttagattgattaggtgtatttttcaaaacagtcttttctttttttttcttttttttttttttttgagacagagtttcactgctgttgcccaggctggagtgcaatggtgcgatctcagctcaccgcaacctccacctccctggttcaagcaattcttctgcctcagcctcttgagtagcttggattacaggcatgtgccaccatgcccggctaattttttgtatttttagtagagacagggtttctccatgttggtcagactggtcttgaactcccgacctctggtgatctgcctgcctaggcctcccaaagtgctgggattacaggcatgagccaccacgcccagccaaaacagtctttatgtaggcttttgtgaatagaaatttgggttaggtgcagtggaaaaggagaagctgtggtgctaaaggctgattaggaaatgaaaggccatttcacagagaagatacctctgagctgtcttgaaagaaggcagtgtttgtctggcatattggccagtgagatattttggttagaagtagaggaatgtttaaagcagaatagataaatactgagtcaggagagaaaaggcaggtttatttatctacaatgtgattatattgttagagtataaacttcaataagaaaagtctaacagggtgtggaccacagacaggtagggtttaagtattgaaaagccttggatattataatctaaatatctgtaaaatatataactagaatatatgggcaaaagtaaaagggggatagatatgaacccgttagagctgttaacagtggatcaagaagacctattctttgagtaccatttgtaaatacttagaagggaatgagttttgagttagtagaagaaaaaataaaatctaggaaataaggaggattcaaaaggagtgatctccttctcactgaaggtattcaaactggaccttcttaaccataggttagagatgctgttgaagggattcttgtatcagctgtgatactgcactagctttttaaaggcattttacaacgttaagattcgttgaaatattttttaaaacatttcaccagcttgtataactgtattttggagaaatcaaagggattttaattctgtgaccttaaaagcatgtatcaagtccagtgtttccatatcaatatgtcagaatatgctccattcatagttgcacagataagccaaactttctgtatagtttctgccacaatctggtttcatttctgctcatgtgggccttctgtaggatagtttctgtggccctcatgtctctcattcctcatcagtctaccatactctccattttccaggatattaacctagttaggagggtccctttgacacttgtttctgtatccactcacctttctcttattcgacctgctctctcttgaagatatttctgtgttctctcaatatatcttctctcaggtgtgattatcaaaggcttatactaccacagtagatgactaattttgctatgtacgtcattgctttaagttttttgtttatttgcttgtgacatcaaggttataagtaaactatataattttacaccactcctacttatagaagttcattcatcagagaaatgcttcggggttacctccaacatgacacacatgctcccgagcactaaagactaacactgcaatgattgagacaaagtagtttgccttgtggggcttatattctgataagaagagaccaattataaacatataaaacaaataaaaacataatagtatttcaaatagtgatgtgccacagagcaaacaaaaaggcaaagagtagtgacttagtgagatagcctgacacttagctgtcatgatcaggggaaaactcagagggagcggcatttgggccaatgcaaaagtgatgggaaggaggcaggaagccagggggaatggcaagagtcaaggccctgaaaagctactgacagggcttcttcagaggtgaaggagaggaccagtgtgggctggatcctggtgggtgagggagagagttgcaggaaaggaagctactgaagtaggttgggggccaggtcagggattaaaaaggtcttaaagcccttgctaacataactgaatgtaattctaattgcagcgagaagccattcaagaattttatctaaaggaactaatttactagaaaaaaataaagatttaggtgtgtcactatataagaacaaatgttacattaaaactcattaggataaatgccttgtagcttgaaggtttagatggaaagtgagattgtcgttttcagtcaaacagaattcaagtgtttcaatttaaccactcatgaatattgctccaaataaattaaatgacctacatcaaagagtgtcattagcagttttaattattcaatttttaaaattaaagatggttggctttactttatagcagtagttggttctttgctcttgtcgatagtttgtggtgtgctcttaccagatgctactcttattatccgaatgaaaatagattcaggtgatattgtagatcatagttgtcactgaatctgaatatattcattctcgaaaccctcatcaacaagactagcatctgttgggaagaaaatcgcccctatttttggttgtatgctcattattttctcatttaagttctgtcactcctgcattattacagcatgaagccactttcttttttcatcaaaatgttaccacggtgtagtttcatttctacgtagttcatagttcatttctatgtactatggactgtgtaggtaatttctacatagttcatttctacatagcttgctgctttttgctagcagctgtatatgctaagaagaacatggtcatttgagtgaatgttgagtgaaaatggctttggacattatttcttttcttctctggctctatccaagatggcaggacattttgggtattatagccacagtggaagaatatgtagggcattgaggtttcctatattaacaaagtatcactttgaacccagctacaacttcaaattctgtctgtgcttttagcatgcctgatatctacttgctcttctgcatctgctacaggtaaaactgagataaattttataatttaacatcttgtgacttgttaaaatggatgtagatccagcaatccctcttctgggtatatacctgcttttgttttaattctggagatttctatcaaaattttcaagcagctcagaaattgtcttattttccatagcaactagtagtataaattgtgttcttttatttccaggaaatgcttccagactgcacacttttacttagaggacagtacatcccctagagttatatccacacctccaacacctatctttccaatttcaggtaatggcttaaagtgtgaccatgagtagctggtagatgttgaacaaaaagcacaatgttgaaaggtttgtttttatcgggacactatgcaaattgctataatgtagattagtaaatttttgtgttgccccaaatatttattacattatgttccaggtactcaggtttatattctgtcctcattaattttaaacgttcttaatcatacagatgatattgcaaaaatagtttataattgttcaggtgtattatgttaaaaacataaacatttatagcaataaaatattagttaagaataatggtgacttttacttattcctattatgttaatggaaacccaagcaacaaaagtcagattaagtcaatgcagaaaatgtggatgggaaaaaaatgacaaaaataaggataaagtcttgttcctttctgattacttgagtttatgtgagaaaagggttttttttttttaacctacattagaagaaaagatctataaaattgtggtggtaatagcaggaaaagccatgaacacaaacaatatatggttgcttgaaataatctctcaaaatgttgaacagttgaatatttgggaagactttagctatttttatcataatttatctgaataacagtattcaaaggtagccagggtcattttgatagagacatccattaatcctagagtttacactataagtaaaatcataaccactcatttttaatataaattcaaggggtgcatgtgcaggtttgctacatggacatgttgcatattcaagccacttatttaattaacattttataacatcttggattgaaaagtggcaacaaaaaatagtggtctagaattgtgtgatctgggaaatagaggacaataaaaggaaagagaagttaagaaagtagggatacaaaaggagaaagtcatctatgggatcatttcacagatggcactttttaaattctctgactgatgctccatattccattgctagaggctcaagttctacaggatgttatcttctgaaatctcatgacttaaaaaacagaaaaaaagtcaaacattttatttatattttacatttatatgttgatgtttgttatatgtttatgtcatatgttatatatattatttatatatatttaactatgatattttctttttgtgccttataaacttaggaattgtgtttgctatttttcctcttttgtcaagtctgtgtctttaagcaccactgttttatttgtttttctagtttacattaaaatactattattttagtaccacagtgtctcattgccatattcagaatttttagaccaacagctctcagttatctgttacattttgattcccttcacttccaaacatgtctcttctgcataccccatcagcatgggtatgcagattaactaaaattttatccaaagtccaacatggtttatttttaacaaataaaataatacaaaatcagacctagtccaggagatccaaactcccctgttttgagtgtcaaaagagtggtgattcaagggcatctccttatttcacttgttcagttctcaaagattccctcttgatcacctgaatatgcatgttttcgtgtaaaaatcagaaagcaaaatgaatgttagtctcacttacttgcagaccaattaataaaagaaattaccaaaatacctgactgtcaataaaaggtactagtctacttatgaaaggaggttggctgtgcaggataacatcaaggggtttgaaggacatttactaggactaatgacttacatgtgacaaatcatttctgttttcttatctaattataaaagcttctaagcaagatccttctataagtgtgaaggtagaattacacctttgtctagtgtttcttaagcttgactgactaattcaattttagtattcagatccactcatctaagagagagaacagatggattccagtttttttttatcagcaaattcttggtaactgaagctttaaaatattagatggcctaaatgctgaacatctgttgctataaataactgtttctagtgaaatgtgtttgatgtttccttgtcagagaaatcacttgtaaaattgcatactgtgaactagtaatatattcagtctaagaaagtctttccaggaaaagaaaaaaaaatcagaaccagttaaaataatttggccccttcacaattaattaacagatccaatgactttgtttacatagcatattttcaagttagaattcttgaaattttacagattaaaagtcccaaaggcttttgacattatccttaatgaaattctccatataaatgttttctattatttacagagagaaggaaaaaatgttttcaaatgtaaacatctatttgactgtaagacattaaattgtacagttttacaaaaccgaaattacactatttattatgcttggtccacactaaaattgaaactatattatttctacattttttctcagaatttacatgcaacatccaggcatgttaaagaaagttgtccatcaaaagatgcagtccactgataaggagtggggctatggtggtatttataaattaacattgaaaataagtgattttatctttaggtatagatggaaaagagattgctgaacaaatcagatttctgaaatacaggttttgattgataataaatgtagagaaaattggtaattgttgcttaacaattgaatgctgagatttagttagaattatacaaataattgaagttgtttcagaagctactttataagtgataggtacgtttatttctgttaaattatgctctctaacacaatttttttattcacgtagatgatgtcggagcaattccaataaagcactttccaaagcatgttgcagatttacatgcaagtagtgggtttactgaagaatttgaggtatgattttaatatgtctattttaaataatatagaaaatagtaaaatttaaaagattcagcaataggctatttcttgacctaaagacagtgcaaccatttgcacttctagtaaaaatatgagttccataattacatatgtgtttaggagatgtgttatagttactatataatttagacaattggttttctattttaaaagccaagttgtactggtggaaacataaaaaacattgttcattttcttccataaagtacaaatctttaatattcttttttaaaatctgaattaataacaatgattctttttaattttctaaattctataaattatactaaactactaaatttcatgatttccagccaaattacataaaaattcttaactgtgatttgtacaccagtgttaatgcaaaagcatttagataacacttacattataccaggtaaaaatgtatcttcttttcaagaaaatatgcatttctaaaaaaaatttgaacttcaaaatcagtaagttttttccaatgatattctgttaaaatactcttagacagaagggcagagaaatttactgcaaatttatcatggcccactgaactatcagctaagtagatttttcaaaatagagagctgtaagcacaaaggtaacaataaaaaccacaaaaaataaaagctaccctttgtgaacaccttcttacatgtcagtggactacatgctttcacattcaactttcacccatctctgggaattacttgttattatttctattcatattattgatgaaatcaaacttcatagaatttaattaacaactgataaataacagagttccattcaaacctaagtctgtgatttaaaaactcatgtcctttccactgtagctgtaagcaggaaggctgtcttcagcctccccgctggccattccccactagagagcttcatattgcatttttgcttctctctcccctaaccccagtggctctgcggacctccctctttgaagtactttgagctgtaagcctaatcacaaaatccactctctcctgattttctttccccactgcacccagcagttgcttcccaggactcacacccatcattatttatttagggaggcaaaatgttatagattagaaagctttaagaaatcaaaagaaagagaggtatgatatgtttttactaatttaaaaataatagaagccaatttatttaattctaaaagaaatctaaatcatagctacattgaataagaaagcagtgtgaggcagtactaagtagggtggaataatataaataattacatgtctaaaacatcaaattattttttattattttgacaggctagaggttacgcatgctatagtgttaactcaatgttaattttagtgttaactgatagaaattatcaggctaacatctaacaaaataagaaaaaatagacaatttataatataaattactgacaacatatacaaattcatggttttcataactataaaatcattttgaatattattaagcagtccaaaataattaaattaataaaataacttcatgttttcacttttaaagttttttcttaattctatctcttttaactcactgcctgattcaagaaaattttacattaactgaataattagcttagtaactaatagcgttataccttttaagtggttcttacatcaaattgcttttaattgttcagaatgacttgctgcaaaagaagccttaaaaggttatgtggagggagattgggccatttgctgatgaatcagatttttattttggttatctactttctcagaaattataaggcttttattttattatataatactaaataattataaattctaaacagatagaaaatatttctgaaagcatattaactcatttttaataaaaaaatgggcagaaataaattttctttacttactgaagtttaaacaaaaagaggtctgctaattaaatatttagagtgttatgctatctaaattttgtttcaaaatgatgtaatgtgtatgatttttaaaatttttaggaaatgattaatgttttgatagccttaaatctgttacaaaccacctaataggaagctgtttactttttaaagtaaccccccaaaaaataaaaacaaaaaagcacatcactaattcagagtttcaaatagtgctactatggtcaaataaaataaaatttggatattagccaatctgactaatatgacaaaatgtatcatggaatatgtggttcctctcatctgcatttttaaaatcatcatattatgacatcactatctccttttaaaagtgttatgttttcttttacataattttaaagttccaaattattagacattttgatttgcatgcaactgtttgaaacattctgttgtgttagtatttgacaaatgtatttattgcatgatcatagttttccattgtaaacctaatatgaacgcttttttttctcatttgtcgtgtgctgtggaatttgatttctttacttttttggcattcattccctcattagacactgaaagagttttaccaggtaaggcattatttcactgcattttcttttagccaagaagtagttgtaacttttaaaaaatttcatttgatagattattttgtttgttttgtcttcgttattatattttaaggcacgttgtttgaaagaatgtgtgttaaaatgatttacatataattttttacaggaagtgcagagctgtactgttgacttaggtattacagcagacagctccaaccacccagacaacaagcacaagaatcgatacataaatatcgttgcctgtaagtatattcttaaatcagctctgacttcaatatcattgccattttggtgccttttaaaagtgtcctgaagtcatctgagagctgaccttagtgtggctgtttggggcctttttatcagggaataataagacttgtgttagataatatgtagcattatatcactctgacttaaataccttctgcaattaataacatctgttttatttaaacaaaacaaacttagaattttaatccaattctttcttttgttctttctttcatagactgttcatctcccttggtggtttttgtcattatttatatgacttggtcctattttcacctaggatttgcttactcttatgtgaatttaccaaccgaattacattttctttaaactttctcttttttcttctacctttacctgtttcctccctttcttggcattcttcctggggtcttataaagaattagttggattctttcttttaattctttctttctctttgttttcttagcctttctctctccctttctcctcaatgagcagctatctggcttttttcattagtgcaattttacgtaatatttctctatgaaattattgtctttcttctgtcttcttatagcacttctggttgcatttgttccctcttatttttgtttatattccccttcatctcctaaaattcatcttcgtgctccctccccactccaaaaacaaacaaacaaacaaataaacattctacttataccctttctatatattcagtggtgtggcccttcctggcttcataggaccatggtattaccaacgaggttatttaaattctggtttcattctagttctgaaagccaatggagctgcactcttctccctgttactatcatgatctcttatatagtttgtatagatgttgccattctttccacagagtttacactaatttttattttttagtagagggctttatgtttgtcttcctgaactgcgtctatcctggctacacataaaactcacttgcttcttgagataaaattattagactttcctctacaagctaaatagaacatacgcatcaggtaattaagaaggagacagagattaacatttgatgaacacctacctactatgtggctggcactgtaaataagttatttcatttaatccctgaaacaaccaggcaagataggaaattgtccaattttagagataaagaaaaacaatccagaaattctaaaactattaaaaccaaactacaaaaataggtcaccctgacattgagacccatctgtcagttgccatacttccatttgcacatacattcctgtatcagtgtgacctgttaccatcacagaagtattcatatcccagagtatctctttaacttgttttggtttggtctgtattcacttcttcatccttgaaaagaataatcttctcagtgaaactgccatgtttccttcaagtaatactttatttctcatatgtattttctccaaataaatagtttttctgtagaactgaatttaatctcaaactcctgtaatcatactttgaattaccatagttataccttatatcatttaccagattttgcatccatcctgttttcactggcagtgtgctatctacctcctctgtgcttgagcagctgttctcctgcctccttttgaagcagtttctctttgaggctcctcctgaaagagctgtttgctgtaaccattcacagaaacttcctagggaacctttggctttcttctctatctcttcttccttcatcagcctcctgttcatccttacctagctttgtgagcctccccacccatcacatttttatctcttcgagaagctctccactgttcacagcccttgtaaccaaccttaaaattccatttaaaagaccaacttcagatgtcaacctctatagaaacttttatctcaaactaaaacaatttctgttttcatatccctccactacattgcacctctcacttgacacctgtgtatataccctagtttcacctattaccttagaaatgttcctgagggtggagattctttttatatttgtctttgttttctttgctgtctctgtatccccaaaaagcctatgaaagtaaatgattgcttgtgttgattttaattgaatgaaataaattattatgcaaatatgaattatctttgtgctgaaaagtagtctgtgctacaatgaaatatattctctttatattacagatgatcatagcagggttaagctagcacagcttgctgaaaaggatggcaaactgactgattatatcaatgccaattatgttgatgtaagcatgttttaattgaaaattttatagaaatcatattagactgaattattataccataatgccatacatgcatacatatactagtgcttaatgtcatgttattcgatagagaataaaaatggtaaagtaacagtaaataatttttaagagagcctatgactaaaaattttcatattaaatgacattcaagctattttacttggtttatctcctgagtgaggaaaggaattcatgatgggagtgtaccttcagggtggaataggtagattcagataggtttctaactctttagatgtgaagggcagggctgggcgcggtggctcacgcctgtaatcccagaactttgggaggctgaggcaggcggatcacgaggtcagaagatcgagaccatcctagctaacacggtgaaaccccatctctactaaaaatacaaaaaaaaattagctgggcgttgtggcgggcgcctgtagtcccagctactcgggaggctgaggcaggagaatggcgtgaacccgggaggcagagtttgcagtgagccgagatcgcacttctgcactccagcctgggcaacagagtgagactccgtctcagaaaaaaaaaaaatgtgaagggcagggccaaggcttattttaagtttcccatagctcctggcacaaggatgtgcatttagctgatgaacaaaaaatttccatagtagtactgattaaaaggcaaacatgattattaatccagttatcaacctttataattttgggtattcctcaggatacccagctttgtggaacttactgggactctccagagactgtagaccgctcactaactaaattggtttttcactgtgatcacctgaatgtcagcagaactcaattacttccctaagatgcacctctcagtctagctggcttcaggttaatactgtgtggaatactgaattcaaataaatgagtacataagtataaagtgggtttgttacaggcaactgtttcatgcttcctgaggaggaaatatgcatgtcagaatgaacatgagatctggagttagaactgattttgaatcccatctctgccactggctagctgtgggactttggaaagccacttaactcctctgagctttaggttcctcatctccacatcagggttgatgcttccattttgcatagatgaaagattaaggttcacgttctgtattagtctatgaaggacactgctatgaaggaatacccaagactgggtaatttataaagaaaagaggtttaattttctcatagttctgcatggctagggaggtctcgggaaacttacagtcatggtgaaaggcacctcttcacagaatggcaggagagagaatgagtgcccagtaaggaggaaagccctttttataaccatcagatctcatgagaactcactcactctcacgagaacagcgtgggggaaatcaccctcatgattccattatttccacctggttcctcccacaacacacaggaattatggaaactacaatttaagatgagatttgggtgggaaaacagccaatccatattatgcccataaaacatcttgtacaaaatgggacacagtgacgaattgctaataatgattagcacttctcagcacgttgaagtagagtaaggaggttacactccagatgcttttttaagctgttgtagacatctgagcccagtgcctaaaatacatttcaaagcagtgctattaaagacttgattttaagcatagcaagtagaccgcaaatggattaaatacacttggaatacaaatgcacagaattatagttgtgtcaaagcaaagagagctattctttttttttttttttttttttttttacaaaaatgatagggatccttctgcttcctaaccaagagtattttctaaccaagagtagctatcttagttggtaccatcaaatttctccaactttgcaagtttattttttatggttttcttttacgaaaaattatgctgaccttaaaaacttaggcattgtacagttaaagatgacatataaatcagttagtaggaaacatttgtcatttaattcttcagggctacaacagaccaaaagcttatattgctgcccaaggcccactgaaatccacagctgaagatttctggagaatgatatgggaacataatgtggaagttattgtcatgataacaaacctcgtggagaaaggaagggtatgtagataatctgttatgtcacccccaaaaaagtaattagaggtactttaaattagttttaatagagtcagcattaggaaggagccaaagttttgagagttatttgggattcttttttagtaaatatgacagctaaagggaaactgttaatactgttagtcaaaaagtttcattatgaatcatgctatctgccttttaaacgcattcttcatactgtgggagaagtaaatgggactcattgaaaagcaatgtagagtgaaatcgattttaattcacaggacatggattttagtcttggctctgtaacctgaatcttctgactcacttgccttatctgaaaggggaaattttagggtacctcatctcagtctcgttcagctctcagattctatccctagcctcctccacaactaatttcagtcacttataaagaaaataaaacatttagaagagtgaaggagtccattcctgtcaccatctcagacctttactgatttcagggaatgacttttacatggagcatttgaaatacagaagtaacatctacattttcttttgcagagaaaatgtgatcagtactggcctgccgatgggagtgaggagtacgggaactttctggtcactcagaagagtgtgcaagtgcttgcctattatactgtgaggaattttactctaagaaacacaaaaataaaaaaggtgagtcaacaaaatgatgggcataatcaagtgaacaatgcatttggtcattttttaagtgaataagcgatagaaccaagaaagggtaaaaagcatataactaaaggcattaaaaattcttgtaaccaggccaggtgcatggcttatgcctgtaatcccaggacattgggaggccaaggtgggtgaattacttgaggtcaggaggtcgagactagcctggccaacatggtgaaaccccatatctactaaaaatgcaaaaatttgctgagtgtggtggtgcacacttgggaggctgaagcacaggaatcacatgtacccaggaggcagaggttgcagtgagctaagatcatgccactgcactccagcctgggcaacagagtgagactctgtcaaaaaaaaaagaaaagaaaaaaaaaaagaattcttatcacagctgccgtcagtcctaaaggtttctttcaggtctctagatgcctgttgtggctttggagccagactggttttgttgctgatgtttaaagtgaatgtgatacatgaacagaaattcctaccttgtgtggcaactgcataggatggccctgacacaatcccaatattcaactaaaaagagtggagagtgaaacaagaaaaagaaaggaaacacgaagaataacgtattactcaggttcttcaaagaaacagaaccaacagaatagagagatagagaggtttacatttttaagaattgactcacatgatcatggggattagcaaatcttaaacctgtaggacaggctggcagcctagaaattctggtaggatctttacgttgcactgttgagaagaattctttattcttcaggtaacctatcctatcagtctttgttcttacagccttcaagtggttgaatggagctcacccacattatggactatgatttgctttactcaaagtctgctgacttacatgttaatcacatctaaacaaaatacctttacagcaacattttgtgtgattagtgttgaccaaacaatgggccaccatagtatagccaagtggacacaaaattaaccatcacaaatgacactctactttctttcattcattatggaccctcaacatcaaatcaagctatgattcctgacttgctgttgaagaaccgtgtgtgtgtgtgtgtgtgtgtgtgtgtgtgtgtgtgtgtgtgtgtgtgtgtgtttgactgttattaactgtctgaacttttccagggctcccagaaaggaagacccagtggacgtgtggtcacacagtatcactacacgcagtggcctgacatgggagtaccagagtactccctgccagtgctgacctttgtgagaaaggcagcctatgccaagcgccatgcagtggggcctgttgtcgtccactgcaggtgagtctcagagatgtgcctctaaacccatagaattgcttatacttgcaaaaaggaaatcaatggaacaaagcttttgcccaaatgggaatgatttcttgaaatgagggtgatgaaattatatgttcattttcataagtattgatcactaggaaatgaacatgccagactcagaattggattgctgaatatttctaagcaccacatattttttgatgttgattattttatttgattgttcaactgcatttcagcttattaactatttgaggcaggtggaacaatgtttttgttgttaaacaaatatttacctcaacatataataccatgggataaaaatgcttgagctacaacccctgtccctaggagttaaaattctgttttagaattattatgccaggcttgtatcacagaagccaaagcacacagattgtgagaaatttggcaaaatatatttaagttgtttttaaacattttgggaccagaatccctttttcattttcttgagttttaatacattacattgaatgtattgtcaattcattgttgccaagattttttaatttccaagactaggttgataaatagaaataatgatgtttcaatgaaagaggaaaaatgttgaaaatccttatttaatgttttcagttaaaataataatagcagttaatatttattgagtgctgactgtgtgccaagccttagatcacaaaaatcaaatttgtttctatgtgaagtattgttatcaaagcagtgtgtttttagagaatcaagtgtttgcctttgatatatagcttatctaacacattctaattaccatctcaggagttaaatttgagagacccatcttgaggctttttaatctgttagcctgattataaactgaggaaaacaggaagatgcaagaaaaatagtgctgaaggtcagggattgtttcctagcaaacggagaaggaccaggctattgtgcagagcaggtgctaattttccactctagcacttcctacttgtcggaacatttgaaaagaatccctgtccgtgaattctgtccctctgctagaggctttgaagaagtcgatagataatggccctttagaaataactgaagtcatgctttattcctcacaatctcactgaaatgatattttcagcagaaagctttatcaaattctttttcccattaacgcagaaatctttacaaacatgtctacctggaaacatagacctagggactttttcttttcagaatttggtgaagttaaagctttcacttttgtcagattaaatgtctatttgccacactctgatacataatattttcattgtacaatatacaatgaataataaatatggtttttgaaagttttaaaatctccaacagatatagtgaggttgttttgcaattagacacatgacaaaacattagaaagggtacttctaaatttgttgtgtaaagcattacgcttaattactaaactgtttacaatattgaattgccaaatgtattgtgtggctcactcgcttgaagaaggaagttattttaatcaacatgacaaccagtagtgatctatttttcaaatttattttatgcttaacattgaaatatttatttcttggtcttctcttcagtgctggagttggaagaacaggcacatatattgtgctagacagtatgttgcagcagattcaacacgaaggaactgtcaacatatttggcttcttaaaacacatccgttcacaaagaaattatttggtacaaactgaggtatgatttttaaaaagatgattttattcatctaaggtatggaaatgtcactaaaatgtaggtgtattcatctcctaggactgcaaaacaaagtaatacaaactgggtgggttagaacaacagaagtttattgtctcatagttctgatgtctgtaggcccatgcccttccagaagcctctagaagattcttccttgcctctttcatctcctggtagccccatgcattgcgtggcttgtggcagcacaattccagtctcagtcttcacttggctgtttccctctgtgtctgtgtctgtatccaaattttcctcctcttataagcataccagttatcctcctcctccagttgatctcatcttaactgattacatctgtaacaaacttttatgcaaataaaatcacactctgagttatcaggcggttagagctttaatatatctttgtggggggacaccattcaacccatgacaccagtaactgcagctatgtcatgaatgagccagataaattttatctgttttgtgaccccaaatagggaatatcctttaaaatgacactggtcacagagaagatacagcaaaagtctaagtagagtggtccacacacatccttgctagcaaaaatctcaagttcttcatatacatagtggatgaatcaattcattttttaaaaaaatatgaattatgcttaaattatatccattttaagcccatatagtttacccgtaagtgacagaacagtgtcagcaaatctgcattttatcttcactgtttctaaataaaaatgaacttaaatggaaacctatgaatggcagcttgaaagcaatcagaaacacatggctgagtgggcttcaaaacgaaaccacaccaaacatccttccatccattatcctaagcaaacttacacaggaacagaaaaccaaataccacatgttctcacttataagtgggagctaaatgatgagaacacatggagacatagaggggaacaacacacactggggcctttcagagggtggaggatggcaggagggagagaatcaggaaaaataactaatggactaatgggtatgagccttaatacctgggtgatgaaatagtctatacaacaaacccccatgacacaagttgacctgtgtaacaaacctgcacatgtacccctgaacttaaaataaacattaaaaaataacattctggtcatataagaccaagaaagagtcccgtatgtgaaatatcagagaactattaactatatataaaattgagttaaattgtatatgacaagcgaaaaggagagttggcgttgccagaaggggtaggcccaccagaagtgtagaagtcaagaaagccctctcatgaagtatagaggtgtcaagtttgaaggataggcagagaggacattcctttgccttgccaactcttcctgcctcctaacctattgtgtattgccaacaatacataataaatgaagaggtaaggaatgagaagaggttctttcttctgtgaccacttcctttcctctgtctgacttccttccaggttttgtaagcaatcttgtgtgggtcttcccccattctgtaaaactctccttgtctgtcaatggaaggtactatgtttgtaggtagatacatatgaggaaaacttgaactaatgttgcttattgtcattgttttgccaggagcaatatgtcttcattcatgatacactggttgaggccatacttagtaaagaaactgaggtgctggacagtcatattcatgcctatgttaatgcactcctcattcctggaccagcaggcaaaacaaagctagagaaacaattccaggtgagtcctcttggaagcctcttggatgtcactacagaactgaatgtccctgcatcttctcatttgagttgacagggtcacgttgagtgggcagtatgggtacaatgactttgtatttgagccatcgttgttccttactgtgggctacagtgccacatggtaaatttcaaggagaaacataattctgagcagcaagaggaaaagttctcagaaaccttaaactaacttttataaatgcaaacttggtcgagaaaagaagggcacagagcataacagaatgaacagaaagaacttgtaaaacatactatataagtgctctttttactttgaaaaaaaaaaacagaccacttaaacatgagtgcggtggctcaggctgttcctgatactctttggaaaaaatctgtgtctcacttgaaacccctggaccaaagtagtacacactggaataatagcttcttcaaccccagtttctccccctcaccctgtctcaaggccataagccagagacaagagcatgttttgtccatattgtacttcccacaataccagctctctgactttcagaaatcagtaggcaaagaattcagaaagcaggtgttaccggacctgccagctgagaccaaagcatgtgcagaatcgtagctttccacaggaatgggggctatattatttcactccacattgttcctgtgctatctgcttgcttctcagagttcctggagaaatagggccaaattttgaagaatgaatatctgggaagaatttggaagaccttagaaaaacccaggagagttaacaaatgttgagatttcacttatttctcctgctttgctccccagtctacagcataggatgttagccaccatgaattcctttgggccatttgccttttaaattactgcacggtgtgcctttggaggtgtaagagaaagattgggatcaatactgagtttagaacctgttgtcagaaagtcatacatgttttactcatccaagcttatctcagtcataaaggaatgccttaggggggaaaagagtatgcagttggttttcagataataaagaaatgttaaaatgtaattaagttgtaaagatatcttttccctaaataaattacacacacacacacacacacacacacacacaatattacccatttcaaaaaaactctcatttaaatatgatttgcccctgtgtagttgcataaaaacattgatatggtaagctaaataatccaggatcaaaatgaaaatattaactataaggtcagaattcaattgaaaagagagatattttactctctttcctgttaacatcataaatagggaaatgtatttgtgtgtatgtgtgtgtaccatcccataaaaagatatctattcgagtttgtctgtagaaaatttccttgaaataagttgaatatctgtgtattcagcaagtacttatcagacacctgccagatgccaggcttttgtgttattagggcgcaaacaagaatttgtaaaataaataaataaagcacacccagctcctagtcttatggtgcctgcagtctattagaagatacaggtaagaaaacacaaacaggccaggtgcagtgggtcacacctgtaattcctctgttttgggggaccatggtcaagaatttgagaccagcttgggcaacagagcaagaccctgtctctataaaaaaattagctgggtgggtggcatgagcctgtagtcctagctacttcagaggctgaggtgagagaattgcctgagctcagaagttcaagattacagtgagctatgattgtgccactgcactccagtctgggagatagagtgagaccttgtctctaaaaaaataaaaaagaaagaaagaaacagataaacaaaatagtgtgaaaaatgccattatagaggtaaaacaggatgctgtaggagtacaggtaaggatgcaacttaccagaggagaattgcgtaagatatatttaagagttgaacacaggatttggtgattcattggacattgcagagagagaggagagaaaagacacaagcataactactcagattctgtttgggcactgggaaagtagtgatgtcattcaccatgatcgagaattcaggaagaggaggtggtacatgcttgagaggtgtggtgagggagaagacgtgagatatttccaaatctaccttatttttaggttactgggagatgtcccaataaacatgtatatttggcagttggatactggttctgaagcataagagaggtctggcctgaagaaatggatttgggagtgatcagcgtagagatggttccttgaagcctcggaattggataaaatagccaattaaaaatgaaatgtctaagaaaggttagaaaggattacttaagaaaacattttaattaacctatgaatggccagcccacaaaggaaaggggggaaagtggcatcagaaggtaggagaaaattcgggacagcggaatatactaggatccaaagtaaataatgtttcttgaaagaggaagtgaacagagatggcaagtgctaatgacaaatcaagtatgttgggaatggaggaggccgttggatttagacagaagtcattgatgacctttgtctaagagctatttgaaaagtatagcattgacaccagattacagggagttaaggagtaaatggatttgaggaattaaagacaattatataactcttaaaaattgtttactctggatagaatgattaagataactataagaaaactttgagttagtaagatttgggggttgtttatttggggtttctttgcttatgttttaatatgagacatgagagcttctttaaaaactaatgggaagggagataattggagagtacagagaccctgggtggtacaaagaggcgggattcaggacacaggtaaaggaattagtgttcaaaatcagtaaaacctatgtgcatgtttacagtagtacacatataggctctaaggctggaggctgaggaagtactctacggtttctattatctgtgaagagaaggtgggtgtgtgtgagtgtgtgtgtgtggtgtgttgctacatatattcctttttttttttttttctctgagacagggtctcactctgtcacccaggctggagtgcagaggcacaatctcggctcactgcaaccttcctctccctggcttaactgatcctcctacctcagcctcccgagtggctaggactatagtaagtgtacacaaccacgcctggttaattttttaaatgttttttgtagagatggggtttcgccatgttgcccagatggtttcgaactcctgagctcaatcgatctgcctgctgtggcctcacaaagtgctggaattatagccatgagccactgcacctggcccattgcacacatactctaaaataaaactgttaatagatgcagagggaaaagggagataattttaaggaatctatatcatatcagtcattttctcagagtataatacagtaaaaattggaaattgacagtgaaaggtttccataaaaattttgatatttgggcattaaaaatacccttttaaataatatacatatttaagaggaaattataaaatctttagaattaaaggtcaaaagaagcactacataacatttttaaagtttttaaaattaaatagaaaattaaaatgattaaataaagatttaacaaaacctaatgcaggttctatcaaaagactattaaaatagacaaacctgtgtccagattgatgaagggaggaaagaatgtgagtaaataatattgagattaaaaaaagagatataatttagaaacatttttaaacacaaaagcatactttgaatatatttgtgacaatacatttgaaaacctatatgaaatgaataatttattgtatgttctaaaataactaaaagcatatcattggattgtttgtaacacaaagaaaggttaaatgcttgaggtgatggatgccccatttaccctcctgtgattattatgcattgtatgcctgcatcagatagctcatgttttccataaatattacaccttttatgtacccaaagaaatgaaaactaaaaagaatttttaaaggaaaaatataatgaaaatacactaaaaatatatagaaaatttaactaggccaatagccattaaggaaatcaaatcagctgcctaaaatcccaccttcaaaatataaccaggcccaaaataatttaatgtcacattttaccaatttttaaggcacagaaaattccaaatgttagcataaaaaatccaggtggaaaactaacccagctattttattggacaaatataactttgataccaaaactgaacaaagacagaataagacacttataggccagtatcaataatcttatttaaaatatcagcaactcaaatccagcagtgtatttctttaatatcatgagcaagtagagtttatagggtttattccaaaaatgaaatgatggtttaacactggaaaatatgaatagatttacataaagaaacattatgaccctgtcaattaatacaggaaaagtagtcaatcaaattctatattgttcatttaaaaaaagaactcttagtaaaccagaaatagaagaaagctttcttagccttctagaaagtatctgtcataaaactacaataaacatcatacataaaaattaaaattggaaatgctcatagtagattccagaaaagataaggaatgtcaattattggccctgctattcaacattattctggaaatagaattaaactagatagatgtataaaggtagaaaaggatttgcagatagataatataactacctgcaaagaatatcaagagaagcaaaagagaaaataattttctttagttagagtttaataaacatacataaaaatcaatagcattgttatttgttagctttgagtgattagaaaatgttttagaacaaaaaagaacccaatcattaacaaaaacaataacaaaacagtagcaaaaacttcatcatctcaaaaaagacacttaacaaaatgtgcagtaaatatagagaaatttataaaagtgaattgaagagcataaaattaggcccaaataaaatataatgttgatacatggaaatattaagatattgcttctccttacattgactatagaagtcaatgcagtatcaatcgaatttatggcaggatttttcatggaaaatgtagaacagattttaatttagcatggaaaattaaacagccaaaatatctcacctatactgaaaaggaaataataatagaagaattctgttgtactgtatatggaagacttatgatgtgatataatagtattggaaaacggaggaatctagcagaggaatgatgcatttgaggaaatctgttatgtggtagagttaacattacgtatcagtgaagaaacagcagattaatctataaataacattgggaaaattttcatgtcaaaaaaagtaacattgtatctctaccactcctcaaacactaaaatgtattcaagatggattaactacctaaaggtgaaagcaaacctttataactattgtaagatcattttagaaaagaaaatattgggttgggcacagtagctcacaccagtaatcccaatactttgggaggccaaggcagggggattgcttgagcccaggagttcgagaccagcctgggtaatatggtgaaaccccttctctataaaaaataccaaaattagccaggtgtggtggtgcatgcctgtagtgccagccactcgggaggctgaggcaggaggaactcatgagcacaggagattgaagctgcatgcactccagcctgggtgacagagtggacacctgtctcaaaaaagaattgaaggggaggagaggggagggaaaaggagaggaggggaggggaggaaaatgcacagcagggcatatattggaaagtatttcttaataacttcaggatagagaaggacttcttacgtaaaatgataatttgcagaaaacttaaataagaaaaataaattggctgtaaatctctgtgtgattaaagaaactgaagatgtttccaactttttacacactatagatttacattcaagacagcaagaaccccctacaaattaataagtggaaatgaagtaaaaatatgaaaaggcaatcatcaaagaagatatcttaatgactaatgagcaccaaaattcacaatttcacagaaattaagacgatgcaaatcaaaaccatgatatactatttttcatttacccgactgtcaaaaataaaacactgaataactgaatactcctaatgctctatggaaaccgtcacacatgtgcacattaagagacatacaggagatgctcatatctataaagctatacaattgcaaaacactgcaaatacccaaatattcactagctgaggagtagataaacagaatgtagattattcatgtaatggagtagtaacagaaggaataaataaaattgaattatatacatatatatgtatatacacacacacgatgtaatttacctccaaacgtctgtgtgagatttaaatagaggaaatggaggttgcacatctatagtggaagccgtgaggaagattatctcaatgctaaaagaattactagagatttctttgcttcttgtaactcccctggtgtaaaacacagaagctccaggaagttcactaaaacaaggttaaattcaaggaattgttggaaaacatttcatatatatttttagtcagtatcttatcttgattggtgtgtgtgtgtgtgtctgtatgtatgtgtgtgtgtgtgtatttgggggacttaaatgaaataacctatatatttttttactttcttgcccagctcctgagccagtcaaatatacagcagagtgactattctgcagccctaaagcaatgcaacagggaaaagaatcgaacttcttctatcatccctggtaagttgtgttgatccttgaaaaaacaacttttttaaaataataaaagccttgtaggaaatttggcaatatttgtatacctttggagcaaatggagcacattcaaatatttttaattttgtccaatatgtaactgttccaaaggactcataaatccttgaagtcttatctaaatatgcaaaatgtatagaaaaattagcttacagatcagagacacttcaacttgaaaaatgtagctatattttacatctggcatggggaaaagatggtacagtgctgtgagcatgagttgttttgttttgttttgttttgttttgttttacaatgaatgttctgtgttccagtggaaagatcaagggttggcatttcatccctgagtggagaaggcacagactacatcaatgcctcctatatcatggtaagtcagagaagtcactgaggagactgccagcttgtgttacagggatcaaaaccagaatgggctgccagaagcaaagactacaggcatgggcaaatgagtggtaaatttaagttaaatctgttgactgcaagcccacagtccacagcaacagttgtaataatggcatgcttttatgtgtgctgggactgaagaaacctcaagcaagaccaattagcagatgcaggaacacaaactcaccatttagggctgatgagtagatataaaacttatacctgcttatctaaaaggctttatttccttcactaaggcagaacccctgagcaaacccgggattcactggcttcagcaaagcctaacctcactgacatcactacttcaggtttgcagcatgatttttagcctgcaaactgggctcattttaggacctggatttctaaagatacaatgcttttcttctgcatttacatcttttgtgtgagggatgagtgttttagtagctgttgtgtgaccttcattaacatttaaggtcaatcaatcacggagcttggcttctgatgaaaacctaattcttattccaaaacctctgttctatttatccagcaaagaaaatattaaggaatatctatgcaggaaacacagggatgtgtggtagtggcatctaaatacattcacatttcaaatgagccactgggtgataggaatgggatctgaaagcagaaggggctagaagagccaggactttagtaacagtataaatatcacagttaatacaatagctctagcttctaggtatctgtagcaaaatatgcaagatgtctccctggttcctctcttgtagaggcaaccaaggtgtctggacaccaaagtgggaaatgtaaactctcctgtagatttcccactctctgtggagtaagagacagtatccacaaagcagtttggtaagtctacagctagaggtgtgtttttaatgaaactgttcaagtttctctatcagcttagctgatagctaccattctcagtgaccaccagatgcccagatgaaagagcaccaataagggattcacctgcatgggttccattgagcagtctcacctaaagtcttcaatgaaaaaccacagtgtgaaaattcagagtttttagtatttatggaccctgaagggttcatggcactggaggccacatgcatagagcttaggcagagcaagcagggaaagagagaaaaggacccatggaccaatgcccccactgagtccagggcattatccaagtaggttttccatggggagttttacttgatgagtttaaagcaagcaggcacaagtcccaggaggttatgtagtgactgagaggtatttactatggcatatctgcaaagtccatgtaggtgtgagggtcagcgaggccagccaagcaggctgttctgtagtgaaatggtcactatggagcagttttgtaagttagacaactggatcgatcactttaaggaactggtggatgggacgatgtagaactggaaactgtatcaaggtgactgaaccctgcttctggcatgacaaagtccaacttatatttaaaaggaatgccaaggcaacataaaaatcataaacattcactacaagatgataggtaaccttgaatactacatctgacttcttaaggcaaacttgggcacaatgcttaatttctaaagcctcagtttaatcatctgtaaaatgggggtcacagttcctatctcacagtattgctgtgaggaacaaacgatttaagagaaaaaaaaacacatagtgtcacacctaacatacaaagtgcccagtaagcattggctataataatcatattactacatatagacacaatctgcaattcaaaagactattttgacttaaggtccattgatgtataaatgcttatctgaatgtttaaaggcatacgccagtgctgtttttgtcttctctttggttttgtagggctattaccagagcaatgaattcatcattacccagcaccctctccttcataccatcaaggatttctggaggatgatatgggaccataatgcccaactggtggttatgattcctgatggccaaaacatggtaagtcccttagaccacttttgggacttcctttacagaggaatatcaggttacaaacagcaaaaagtccagcatacaaacaagcaaagtaattttgttttcaactaataaactaatgtcattgaaggcatactcttctgctgttgggcttggtttcattatacaatctcctaggtcaaagtgatgaataaaagttttaaatgaaagtagatataaatgaacttaaatgtatgtgttttgtgacattgcttaagaaaattagaatcacagccatgaaagaaatcagtctatatgcttctatttacatttttaaaataaaatgtgttagaatatttagagattccctgagtttaaggaggtctctaattttttctttaaaaaaaagacctagttagaattaagtgatttcctagtataggaaggacttttttagtataagaaaagcagcgatatcccatccccctctttatatatgtttggagaacccaacaagtaaaataaatatttcatttaggctttacatgtttacttagctttgatattcagttcttatctataaagttattgtgtgaccattacacatgaggctggaaatttctgagctcttaaaatcacttgaatcttctgtactcagttgtcaattacagaagcaataagcttatcattgttgataagctaagagcataaaataataaagcaatagtttgggttcctaagtgtgatattttattcagcacatcaatctagttgaaggcacgagaaagatgttaagagtaaatattcagattcaaagaaaaattggagttgaaatttctgtgccaaccaattaactttatttcacaatctgacttattggtcattttattaaaatctagactcttctttcatttgcaattctgcaggcagaagatgaatttgtttactggccaaataaagatgagcctataaattgtgagagctttaaggtcactcttatggctgaagaacacaaatgtctatctaatgaggaaaaacttataattcaggactttatcttagaagctacacaggtaaggatataagttaaatgacaaactttttatcttaaacacatgttaaacatattctgacctaaggatctgtcctagaaatgaaaagcatgattctgattttttccccattgagacaaatacacaaataatcaaattaccttgtcactttcattttcaaaatgatatagaatcattaaacaattagtcatcactacgtcattcctgaattttacacacacaggaaatcaaagctcatttactccagattagtggttgacagaacttaggtgaaaaataaacacagtaaaagaataaatttattaattttaattctcatgttttaatgtaatcccttaccttgtaagtaaaatgggaaaaatactacctacctaaactctcctaagtaaaatgggaaaaatactacctaccgaaacttactattctctaccaatgtagaaagttgatgagtgatagtgatgtagtaagttgataaatgaagtgctttgaaaacacacaggacaataaactaagaatattttactaaagtcttggttatctattacacaagatactgttgttatctacaagataatacattgttttactaaacttaattatatgcaaatatctattattgaattatttgtcaatgattatttacatagaactatagtaaaatactaaaagatactaacaatgatgtctaaggaatgtgagattcagagtaccttctcaatatgacaaagattaaatcatgttccaaataatttgaatgtttcacttttctctagttctgaaaactagtacatatatggtatacaagaagattctctatcctctagaatatttaaatgaccaatacatataaacttgataatacaaataactaatagtgtaaacagcatagcagtggaatagtatcctatctcattaaaacaaaaaagacttaggtctttatttgtaaaatgaagggcagaaactagaaggctcgtaaggtccctgagagctcttaatgttccatgctaatttctatctctgattactccctgatcactttagtagcatccatttagatctgccatctctcatgccttctcattattcctagttagtaagaaagcctattacaagagtaataatcattatatacctattatcttgtcacacccattatcctgatcactgatcatgtttaatatcttgctcagcactgggaaattagcactgtttttctcctagtattattcagaaaataaactagataatacaggttcctgattgatcctaattcagtatgtctcatctatgtaaatcagctattatggacaacttgataatccaggagcccaacccagggataaacagtatttctataacaaagatcaaaaaagaaggaaagactaaactggacagtttcattaacttcagacatttttaggcactttaaccaaatatcacatttgaggttagtagacaagtgaaggtctatgctactgagctcaaaagctaggggccttttatttatgtatttgttatgaggactatttttaagaatttattaaatattgaatatatttaagatgtttatattatatgtgcaaggtttgacaattatgttaaattacttttacccaccattgactttaagaaatagaacatggccttgaccatcaagtctttcatttgctccctatccccttcatcctctcctcacttcagaagtagcctcttcctgaattagtgtttattgttctcttgacttattttatcagttaacccttgtctttgttttccttcacacgcgtgctgcttacttttaaatatctgtgaactttatataaattatgtgtattatgctactcagatttatctatgtatttgggtatagttcaaattcatttactgctgctgcttagcattccagataatacatatccttttttctattttacatgcaaattattacttgtttgttgtgttttgtcttggtttgatgttgctattacgaacagtgctgatatgaatatttttagtcacatgcaaaatttcctcttggggatatcctgggaattcccctgctgtgttattgtgttggatcatcttcaactttctttaactttactaaatgaattcaattgttttccaaagtcatcctacaaaggtatcctctcatcaggaatgtatgagtgcactacatcctcatcagtgcttgtgctgggaatgaaacggcatctcttgttggttttaatttgcatttctcttgttgaaaatgaagttttcaacataactttacatttttacataattatttacataaataatatttttacatacaatatgttttatacatattatttttacataaacatatttttatataaattaattgaccattcagattttatcttttgtactgtgtctgttcatgatttttgcccatttttctgttaggttatttatcatttactgatttatcagaggtctcgtattgtggatactaatcctttgtcagctgcatatattgcaaatactttctcccagtttgggatttgaattttttactttctttgtgattcttttttttttttttgtctttttttttgtgaaagaaaagttttgaagtttaatctatatgaatgtattgatctttttattcctggcctttaaaaggaaaccatcatttagtatcttaaaaaaataccttttaccctgaaatcatgaagatgctctcttacactgttttccaaacgtaccacctgaaattgactttttgtattatattttgtgagacaagggttcggtttcattattttccatgtgatacccattgtcccaccattatttatgaattagcaatatcagttcagtcattcatatagtgtgtgtgtgtgtgtgtgtgtatatatatacatatatatatacatatatatatgtgtgcttgttctaggacatttattttattccattggtcactttgttcatccctcagccacaatggcagtgttttacttcttatagcttagagtaattcttgatatctgatgagttaatttcctctattgtttttcttatttaccagtatcttggctattttggccctttgcacttttatgtaaaatttaggttctgctacttgtttttaaaaaaggtatcatttttttaaaaaagtacacttttggaagctggaggcgagaagtttaagggatttatcaagtcacagtcttgttggtcacttaagtaagaatcagaattgggatccgagttgaacctagatctctacctccttgtcggcgttttctccactgtgtcatgcaatcttttacttaagcctgaggattactgataagtgaagaaagtgtatgctattttcaaaacagattttaacaccaatgatttccttttataaatttgaatttagccgtgcaaatacatctttgatacatagtttcatggtttgtaagcattggcatatttcacccacagatagagtttatttttagaataaaaaaagaaattatgttttttgattctactagtaaatctatgcatgttaaatgtggcatcacaactgtttcttccttctatgatgaagaatgtgctgcaactactgctgctcactcatgcctgccattgggttttattaccttactgtaattcctgattttcctcaatgattccactcctggtaaactgtcactaactaacattactttgtgttttcttgttataggatgattatgtacttgaagtgaggcactttcagtgtcctaaatggccaaatccagatagccccattagtaaaacttttgaacttataagtgttataaaagaagaagctgccaatagggatgggcctatgattgttcatgatgagtaagttccatgtgttagatggtttcacacctgcacattttctgggcatatgtatatttctgttgtcttcagacaaacctaatgctttggacccactgtgatgattcagccatggtggattatctgcatcttatcaataaagttaacacagaacattttttttttttttacttcacttgaagtccctgttgaagacagagaatggggtcatgatcacaaatatcttctcttgcatttgatgctgagaacactttgtatactaagtcggtgttttagcagtgaaattttcaggagccaaccagagaggcattttcagtcattgatttcctggcatagaagtgaaattgatatgatttttatttttcaggaacaagaaaccatccaataaatcttcctaggattccatcatagacaaataaaaaatgcatatgctgaacttatgttataaatatataaaatacagtttgttatatatgtatttatacattatattatatgtgtattatacatgtctttatatgatactctcaggttttttttattattgccaactcctttcatagtatacaaataataaaccataagcaaatactaaacttctgtaaagtattccactattgatatcatgaacacttggcaatatttcagattaaatcatagttctttgtgcaaaaagcgaagagagacaattcattaaaagtttcagtgttttcactgcaaagttgtcaaggctatatgctttgtgagttctaaatgtgagtggtgcatctcaatggagtctttgttccttttcttttttttttttacaaggcatggaggagtgacggcaggaactttctgtgctctgacaacccttatgcaccaactagaaaaagaaaattccgtggatgtttaccaggtagccaagatgatcaatctgatgaggccaggagtctttgctgacattgtaagtaacaaggcagtgaacgaaatttttcactgatagagtacaactaacttcctagaggctgctgaaatcttatgtatcaagaaagatcttattaactgataacattagtatgtagttttcaagctgaattacaagtccacaatccatagaacaacaacatttaaaatttatacttcagaaaatttatggataaaaacttttaaatctcatgtttgcctttgtgcacaatagtaaacaatgcaaataagcttaggtgaatgtagaagtcataggctcaccttcagctctttggtctgtttaagggccttataaagggaccttcttcaaagctccagcctagaccagttggcaggaggtcaaagttatcttcatgcacatgcactgcagaggagcccctaataagtcttattcggggccgctgagttgtatcaagcttgtgctgcatgaaactcctttctggagatgcacagttcgcgaaagcatttaattatgcactgcgtcacatgtaggcctcatggttttcggctatgatgctgctcactggttcaggttctctgtagctacctctccccaaactgcctgagatggcatctgtaagagaaaaactgtttcatgcttctatgtgccactgctctgagaccacagcagagaaggtacttacctttgctcatagcagggcataggaccagttgggctgatagaatgtgaaattcttcttattggtgaacagtgaaggattgcattctacatgggttcctgggctaacagtacagtcattcctgagatctttccgtaaagaggcagacccaatggattttctaacaagtagagaaagaagaaacttgtttctgagtgagttacagatgtccagtgccaaacggtttcgcccacaagttaacagaaccctgtctcatcaccttctgatttcatgaataagaattaagtacttattggcaaatgtatgtaggttaattttctaggtcagtgaatggtctgccgattgcaacgttaatttaatcagaagagacatcagtataggttgtgtgcatctgctgagtataacagtgcccttaacacattgccctttcatgaacagtgctgaagtgtgtctaaaaatatttcttctttttacaaatgtatgtcttcactgagcttcgcatttattacctcccatcttctgttctctaggagcagtatcagtttctctacaaagtgatcctcagccttgtgagcacaaggcaggaagagaatccatccacctctctggacagtaatggtgcagcattgcctgatggaaatatagctgagagcttagagtctttagtttaacacagaaaggggtgggggaactcacatctgagcattgttttcctcttcctaaaattaggcaggaaaatcagtctagttctgttatctgttgatttcccatcacctgacagtaactttcatgacataggattctgccgccaaatttatatcattaacaatgtgtgcctttttgcaagacttgtaatttacttattatgtttgaactaaaatgattgaattttacagtatttctaagaatggaattgtggtatttttttctgtattgattttaacagaaaatttcaatttatagaggttaggaattccaaactacagaaaatgtttgtttttagtgtcaaatttttagctgtatttgtagcaattatcaggtttgctagaaatataacttttaatacagtagcctgtaaataaaacactcttccatatgatattcaacattttacaactgcagtattcacctaaagtagaaataatctgttacttattgtaaatactgccctagtgtctccatggaccaaatttatatttataattgtagatttttatattttactactgagtcaagttttctagttctgtgtaattgtttagtttaatgacgtagttcattagctggtcttactctaccagttttctgacattgtattgtgttacctaagtcattaactttgtttcagcatgtaattttaacttttgtggaaaatagaaataccttcattttgaaagaagtttttatgagaataacaccttaccaaacattgttcaaatggtttttatccaaggaattgcaaaaataaatataaatattgccattaatttgtgtttgcttgtggagcattgtgctgaagcgtgtgtggcagaaaattgtggatgtgggtccccctatgatgatggcacacacacacacaaaaaacagctagtaggatgggacaggatttagagtggtgggtcccaaactgtgcattgaggtgcacagggaagtacaaaactttccatttgtgaggaaaacacagcaacatgtgcagacactgcacaaacttttactattaaattatttgaactttactacttaatgaacagaacaattatgtatttcttttggcttggggagtgctatgatctgaatgtttatgtctcccgacaatttatcccctcaccctcaaggtgataatattaggaagtaggacctttgggaggtgattagttcataagggcagagctctcataaatgagattagtgtccttataaaagaggcctgagcgagacccctcacccctttcgatgtgtgagattatgatgagaagacagctgtctataagaaagcaagccttcaccagacatcgaatctgcgggcaccttgatctcggaacttagcctccagaagtgtgagaaataaatctatgtttgtttataagccaccatatttatggtattttgttacagcagtctgaatggaccaagacacagaattctgaaaatgttactgatgaattaagagcatcatgtaccaagaaatgttgggaacttccgatttagaaactagctggaagttagaagtaggcagatttgctagtcagagactccaatataagcaaaggtcaaggaggggattggaaaaggcatagacagacaaggactacgaggtaaaaaaaaattccagaatggaaaaagagaagaggtcccatgttgagcaaatcatcaagatccaagagccacatggaactgaaattcaggaaaatggaatcattagtatcaagcagactttgatgcttgcagcagtcccctgcctctgccaggagtgttttataatactacctacaaaggagctcactgttccctaagaatgctcagctcagggcccagaacaggaagctagagaagttttgtttaaaccagtggctctcaaaatatgattcccagatttgtagcatggacaaaatcagggaacttgttagaaatggaattctcagattcccatctgtcagaaactctgggggctagggcccaacaatctaatgaatgctaaagtttcagaaccattgctctatagcaacaacacttcagggagcctccagttacctcaagcaatatcaagaaattttcacaatgtctttaaaatagagctaaaattaattagctttcctttttatgggagcttttcttttaaagcaatagtcatgggagatatgaaatagaaataggcacacacaaaaaaatctcataaatagtagtgtgacaaatccccaaatggtgataagcaccactctacaaggtacaaaaagaattaatgtacttcttatttctcctcccagagaggaaggacacaaggttaattttgaattcctttgttgcttttctaaccttatctccttgtcctcttgttttacagttttgttttatcaccacccacaatgtctaatcatgagctgatctgaatcagtaatacatatcacctcaattattttgtctatttttcccttagcctttgtcccaggaacaagcagcctttgaggagatacagaatttttttaccctttaaggttatttatttagtaatgtgacttacagagtcttgtccaacagaaaataattatgcagtaacatgtatatcatatcagttatgcattcttatataaatgttaataaatatattctgaaacagattaaaaagaaaattcctgtcagatacagcaacattttctctttccttgatccttaactctgaggcaataatcagctatgagacaaatgaaaataaatgaagccaggtaagtcggtcaggtaagtatcactcgatttttccatccaacaccaaaatttcattccttgtgtttaacacactcacagcttttttccatatattgttttatttttataattgtgttctcattgtgaatatgtttttatgcttctttttatagtgatataggcattttttattacacataatctataagcctacctttgccaaggctatataatatttcattcagtatagcagtttcaaagaaggggacatttgacactgtctggcaatgtctggagatatttttgatgattacaactggccagagggtgaggggtgctactggcaactactgggtagaagccagagatgccaccaaacattcaacaatgcataggacagtcctcacaacaaagaatcacccagaacacaatgtcaatagtgccaagacagagaaaccctgttcttacactatgggtcttataatcattttcctaatattggttttttgttgttgtttgtttttttgttgttgttgttttttgttttgttttgttgtttttttcttttttttttttttttttttgggagacggagtttcactgtgttgccaggctggagtgcagttgtgcaatctcagctcactgcaacctccgcctcccgggttcatgccattctcctgcctcagcctcccgagtagctgggacaacaggtgcgcgggccaccatgcccggctaatttttgtatttttagtagagatggggtttcaccatgttggccaggatggtcttgatctcttgatatcgtgatctgcctgcctcagcctcccaaagtgctgggattacaggcatgagccaccgcgcccggcccctaatattggctctttcgaatccttcctattacaatacaatgataaacatttatttgtgcagaaaagcttttcatcaggtttaggattattcctcaggaccaattgttgtgttatttgggggagcagatagtatgaacatttttaccttactactctttcactttccaaaagagttaggctgttgagacctccactggcagggtattagagtcctattgttccactcatgggttcaggtctctgctcaaatatctcctcagagaagcattctctgatcagcctgtctgaagtggcattccctcctctcacgaaggagattcaaaatatttagcagtaaccatcagaagagactgagtcatccgcaccagcagaatgtcagcctgtctctccgccactcccatcaggccctctttgtctctttatcatgctttatctttatccataacactccttgttttctgacattatatttgtttgttatttttccctttcattcgtatataagctccatgagaagaggagtcttgattcttttgttaacctcatatccccacatgtagaacggtgcctggcacactaacagcagtcacagtattttaggtgaatgaaaaaaggaatgcattgatttttacctaaaaggaaaatactctttttaatagtcctttccttgtaaacctgacactttataggcgatgttacttaacataataaatttactagttttggcaaaatatctgttcttagtttttttctttggtaacacctttgtaaattactccagttgaaaaaggaagttctaatgcatctccagttttaaatcatggagagcagttttgaaacctcaaaagtagtattaatcaggagcataatccatccctttagctacctccataaggactacagagtccatcatagttccaatatgatacttcttgagatactgtgacagcagcttcttcatgtaaaatcaatgcaaacatttaacagatgcatgttctgctcaaattatacagtgaaaatcttactgaattttagtatttcttatctgaaagcctcaaatctcttagtacctattatgacaggctatttctctaatacacaaaacttggaaactataatctctttactagcagataaatttaaaaatgtgatattagaattgaattctgcttacaaatagcgcatcagaaatattaagcatttattgaattgaacttaactctttagggaaaatggaaaatctgcacatttgtcaagataaacaaaacatgctttttaatattataaaccatgattgattattatcattcatttgctaattgcaacatattctggtacattagagatctcttcctcattagtatgatatgggtgtgttagggtggcattaaatgttaagacatataaatgtaagacactgcaccagttttaagaatctaaacatccttgacattaaattgtagttaccaagggttttttgtttttttttttaagaaaaacatttttaaaaaaataagatttggaagtgggagtaagaaaaactgtaggtgttaaattgaaacttcttgttacatacagaaaattatcagtccatcagctgtgacacattctaagcaggccacaagaagcacagactgaccttagagaactgctccaaatacgctaatttgaaatattttacttttgcatgagccattcccagtatctctcagatttctattatcttgcttcaatcctaggagagttgctttagttctgaattatccatacaaagagatgaactgatgcaagtaattgttatcctcattgctaatttatttaataaagccttgtagtgaaaactatcagcattaaagttctttatgaaaaatattaaaatagcaaagtctgttatagcaccttcaaggaagtaacttaagagacttaggaagttaaaactgtatgtttcctgggctttttaaagaatgttaaatgaaaaaagttccacattttgtctacatggcattctagttttatgtccaaggggatacataaaaagaatcaataaaacacctagagaagaaaatgaactgttaaaataattattaaggccgttgaggaaatattgacaaggccaatgagaaagattaactagggtaaatctctgtgtattcacagccactcaccctctagggaacctttctgcagcaaattatattttccaaaaacagccagacagtatctatcttctgtcctgtatgtgactctttgaaactcatcccattgagaagcagggtctatggtccctcctcttggatctatggtgaaagtgatgctatgtgacttccaagcccaagtcacaaaagaatcagtttctgcctgattctcttggaatgtttgctcctggagcagccccaccatgctgtgtcaaagctgcatagccatggaaagacctacatcaaagaaaccaaggccctggcccacggctccagatgagcttccaggcagaaccattttgtcagctatgtaggcaagctgtcatgaaatggattctccaactttgtatcaacacatctcaagtgacactacatggaccagagaccagctgtttgcactgagtcatgcccaaattataggttgatgagcaaaataagtgactactgttttaagacactacattttggggtagtgtgttacacagcaatagtaactagaacacttcctacacttcaaagcctaaaatgctagcaactcttatttcccagactgcttcgcagctagggtcctggatgaagtatgttccaccacatacagggagtcacaggtctggaaacacaatgttattttaccatgcattataatgtaatattaaatgatttatcatatatttattcatgctttctgacttgctggctaccctggaaatgcccttacacagatttagaagacagaaattcacagaagccctcttcctgccctcttggaccctgctggtaagaagattataaagatataatttttctgcaacagggttctagtacctaattttggaaccatggcagcaagggcagtagcttctgattctagcttcccaatcctgggaccctagctatgtgtatacactcttggtcttcgtgccttgtatgaagttttctttaaaatacctagagtggtttctgctccctgctccaaattcagcaaactggaaaagaatggtctaaatgatgctatgaccatccaatcattttttcaagtatcttttcttctgatactgcagtagcctcagaatatgtcttcttctggctctttcccctttccctgattcattctcaacactcagtcgaataaatcttttagaagcataaagctgatcctatcagccccctgtaatgtcaaccatgaaatgacctaaacctatggttacacaatgatgttgatagtcagggctggctcagactcatactgatgctctttacccaccctcatgttttggggaaattttcacacaaactccaagaaggaaaaaaatgatagagaagaatgtgtctctttagcattactatccaatgttcaaatataacctaaagctgcattacatacaagccaagcctgtaacaactttcccttatctccacctcaaccttcaacacatcttcgtaccatggcttttaaatgtcagtactattctgcaatatttgtatatgccagaattaaataatcataccatatatatgccataattgtttgtttttatgtataattttaattgtatatagttatacataaattgacatctctgttcagaaattatatataattatttatatatataaaacaagcaattatatatgatataattaattatatatggtacaattatatataattaaaattatatatatagcaaatttatacagtattatatatatttatgtatatataatttctgctatgtgctaggcaccgtgacaggtgttgaggatacattggagtctagtggaatcttagtttggattgctatagaagcagaacctgtgacaagaatttaatgcctgtcaggaggaaaatgagtcagggaaggaaagacagctgataacagatgtagtatcagtcaagttcctcaagtggataactggaatataatccctttgtagaattctgggagccagtagaagacatccacatccaaattatcccatccaaaaatctaacgagctagcctattgatatatcagctcccatgggtcattggttggctgaagagactggaagtgaggagggtcacaattcctggcatttctgggctgctgtgattatgagcaaagagagttttcactgtcaaagaaagccttcaggcaaagagaggctgacggttggaagtccaaagtgtgcagtgtgatggtaaggccaagatgtgagtgcaactggtgtgctagaaatagttttgtctgtatggtgtatgactcagcggggatttatttatttatttatttatctattgaccttggaaagggaaatcaaagactgcttttattgatgcacaaatagacccacccatgatttgaaagggatgataatattaacataatcattatcatcaaagcaaattaaaatgcaaaggtatctgaaatggctttacagttatatgatgccttaataaattaaggaaactgattgctctgagtggcttctttcagtggggatttattgtttttcaccttcacctaccagatgtcagcaacaccctgccccaagtctgtaacaacgaaaaatcttccacatattttcaaaagcctacagtcaatgaaatcacagagtaattcgtgttatgaaaaaaatagtatagggtcctttagaaataccttacacttgtgaatcctcaagaaagtaacttctaagctacaacctaaaaagaggactaggagttaaccaggtaaaaggttaggaggagatgaatgggtaaaaaaacacaaccagaaaaggctcaaaaacaagaaagggcaagtctattcaaggaggtgaaggaagttcaggaattggataatattttgtaaggaggtgggcaatgatgagatgagactataaagatatacagggggacatttatgctgagccctggaggctataatacgtctgaattttatcctgggaggaatggggagacagctgagagtaagaacatgaccatatttgcagttttgaaagattaatgtgtctactgtgagaagaatggtcattaggggagtaattctggagagagggaggccaggtgaaagactgtcacaatgatccatataaaatataatagcagcctgaccaagacaagttgtatgtgggtagaaagacttggagccaatacgtttaatagagaagagaaagtcctgatttggtgaatgtggaagtgagagaaaagagagcatcaaggattatatagagagcaactagggtgatagtggttgccagttcctgaaatgagtaatcacatgaaggatccatttagcagtcctagcttggccccattgagaaacactaatttatagtataaatttttaaatttacattgagtttaagaagtcttggaaatatctgaacagggatgtcaagtagatagtagtacagataatctgaagctcaggtgagaaaattgggattgatttaagacgtaggtggcattcgatgccatgggtaggatacatgcacccaggaagaacacagagagagagagaaaaaaaaaagccagagaagaaatccgaaaaacatcaataattaccatatggacagataaataagaggatgcaaagcatcaccatctttattaagcatcttacatgatgaaccatttgcacaattttcaccagattcatagtccagaactaaacagaaccaccgtggcagccaaacattttctaacattgcaaagtatgaacaatccatgcccctgggagttgctattctctcatcttttctgttggtcttccccaggttttacagcacctatttcagttactttcccagctcccatttgacttctacctccttttaattatttctctcaaggagaataaatcttttatcaatagtttgctattaaggcaagcatgatttttttctttgtcaaggttatgaggtttctatgggggtttgttttaccctgtgccaggttcactgtgaatcaggctcagattattggagccaagggtctggttagttgtgcctggcaacagcccagaatcatctccaatgtaacaaagaggagcgcaatatcaattcagcttcatgagctctcaggctgggagtgggattcccagggtttatgaatttgttagctggtgatgtagcacacactgtcaattaacatgaaactagaaggtactagaaaccttcgattttactacactgacaacttaaaccgggaggatgtaacctcttgatctaaaaagttaggactgtgttttgtaattcttgctaattaatgaaaattaagaatgggtattaggactaaaacaagattggaaaaaggaagttattagattaattgtcagtaactaacaagtatcactccagaacagccagcttttctcactggattccttccactggagttcagatctggtagatgtagttccactgcaaacaatcagcaaatgtaagccactaacactatacaaaacataaagataagattaccttgcacagatgtgtaaattacgcattgcatctaaaggagaactaatcatatcatagacgttaaagatttctgtattcacaatagcaattttccattagagggtagcaaagtgttttactctaatacattgtatatttaggaacaattttttgaccagtagaagtgtcttgagaaggaatgccttgttctaattttcaaaaagacaccatatggactagtggtgggccctaagtcatccatcctagaagatgttttaaaaatcagggtgctcccaaattgtttcaagtattttgagtgtctccaaatgatgatcaaatttcaacattaagtcttatcacctgaggcaagtcatttaactttatgaggcacattttctcttctctgaagtcagaggcttggccaaatgattgttgtggtctttttcatctcttcaaccactttatgtagcagataaatctatggcttgtttaagcggcatggatctttgaggagtcttccaaaggtatccaagaaattgaaaaaatatatcaaagttaagatcgtattaactaaacataaacttcaggcaaaaactgtattgtaaaagagagaagaacaacccacttgtgttttttaacatctactaagtggcaagcatttctctctcattatctcattaatttttataatcatcccgggagttaccgttatcctcatttcataaagaagagaacagctagtatgttgtagagccattcacattgtgtagtatgatctagtgtctctttaacctagaacaaggaaaaatggataatacaaatattggtattatctaaaaaagaacaaaagaggcagaaagatctgaaacatgtgagcattaagtctaccagaatggttagaccaagggcccacaaactggctcgagggtcacgtctgcctatcacttgctcttgcaaataaggttttattgaaacacagccatgcccattcatttatgtactgtttatggctgctttcataatatataggcagaaataaacagttgtgatatctttggtcagcaaagcctaaaatgtttatatctgactttcacagaaaaataattgtggactcctggtgaagctatatgttgatatgcctataaccataacctgctcattcattcccaaatcctatcaccaccacatttattattattttatactttaagttctagggtacatgtgcacaacgtgtaggattgttacatatgtatacatgtgccatgttggtgcgctgcacccattaactcgtcatttacattaggtatatctcctaatgctatccctctccccttcccctaccccacgacaggccccggtgtgtgatgttcctcttcctgggtccaagtgttctcattgttcatttcctacctatgagtgagaacatgtgcaccaccacctttattattaaaggtactgcaggaaaatttgttattgagggataatgtagtgtttaattacatatagctgtattcaagcttactgacattgccttttctattaccacgtttaacactaacattaaatcagctcttcaaatcaaatcccctttaattctcattgtcatcataaagcacaaactagttaactacactgagagctcaactggatcccagttctgacacaaagtgctagtttctcagttcccaattaatctgggcgccgttttagatagtgaaatcaatatgacacgagttgtatttcctaatcaattgggtcgaactgaatgtcatggtaagaaaaattccacaacaaaatgtttttacttattaatagattattgatctccatatattatctgtgacaggtgggaccaggccttaatcaattttgattgttttcaaatagcaggagatgttttctcaactgtcatatacctcacatgtagtacctgcttctttcaagggcagaattagtttcacgtgccaggatatgagcacaatttgtgaaggttaaaaaggtgcttactttgtatctctaaaggcaagagatttttccccaagaagcaaacaaacaaattgcatttgtaatttaattttttataacaacttgagataaaatctacataccacacagttcaaacattcaaagtatacaattcagtggtttttagtatattcagagttgtgccaccattaccacaatcaactttacaacgtttacatcaccccaaaaaagaaaccccatactaattagcagtcacccctttgtcctccccaacccttcagcctaagcaaccactaatctgccttctctctatatatattcgcctgttctggacatttcatataaatgaaatcatataatatgtggcctttcatgtctggcattcttcacttgatatgttttcaaggtttttccatgttgtggtgcatatcagtacttcatctctttttttattgctgaataatattccttgtatggatatgccacgttttgtttattcacttgttagttgatagaaattagggctgtttcaattttgggctattataaataatgctgcaaagaacatctgtgcacaagtttttgtgtagacatttgtttttatatcacgtgggtatccaccaacagtgcatgagggttccaatttctctgcatcctcaccaacacttgatattatcactttgattatatatctattccagtgagtgttaagtgatatctcattgtagatctcatttgcatttccctgatggctagtgatgttgagaaccttttcatgtgcttattggccttttgtgtatcttctttggagaactgttaattcagatctcttgttgatttttaaaaattgaattatatgccttttaattattattgtaacagttctttacatattctaaatacaaattcctcccttaactaatacatgattttaaaaaaaattatctcattctgtgggttgtatttttgctttcttgatattgtccttggaaacacaaatggttttaattttaatttacctattttcttcttttgttgcttgtgtttttagtgtcatttatttaagaaatcattgcctaattcaaagtcagaaagatttacgccatgttttctttgaagatacttacaatattagctcttacatttagatcttaggtcaactttgagttaatttttatatgcaatatgaggtaggagtccaatttcattattttgcatgtggatatccatgtttccaagcatcatttaatgaaaaagactattttgcccccattgaattgtcttagcactattttcaaaagtcagttgatgataaatgtgatcaatatttctggaccctcaattatattggtattttactctttctgatgctgtcaatttttttcttttcttttttgttttttttgagtcaaggtctaactctgtcatccaggctggattgcagtgacccagttatagctcattgcagcttcgaactttggggctcaagccatccttacacctcagcctctgagtagctgagacgacagatgagtgtcatcacatccagctgttttttgtttgcttgttgttttttgtttgtttgtttttgtagagatgggatctcactgtttcccaggctggtctcctggcctctagcagtctttctgcctcagactcccaaagtgttgggattacaggcacaagccaccaagcttgaccattgttgaaaattaaattgttttcttaacatcatttttgatttattcattgatactatattgaaagataaccaatttctgcatatttaatcctgtatcctgtaactttgctgaatttatttattaataaatcatgcctttggattttctatagttttcccttggattactatgcacaaaaccaccatatcgtctcccatctctatttagttatacttcttcctttccaacctagatgacttttattttattttcttgcctaattgccctttcttgactgtccagtacaagttgaatagaaatggccaaagcagacatccttgtcttgtttctgatctcagggggaaataatccagtccttcaccattaagtatgatgctaaccatgggttcttcatagatgccctttatcaggttgaggaagtttccttctattcctagtttgttgagggttttttattttttattttttattgtgaaagggtgttgaattttgttaaatacttttcctgtgcctaatgaagtgatcttgtaaattgtaatttaatcttatctattctcatgtccaaacactcaagagaaaactataaggaactatatttacaaaataaatcataactttacaaaaagggcataaaatagcattttggcaaaaacttaacttaggtaatctgaaggtatctaactgtatcaattttaaaaatataaaaatatagctttatgacgaaattttttctgactaaaaaagtaaaacttcatttgctggttataagacaatatgttcatttaagaaaaaagtggacatcctggctaacatggtgaaaccccgtctctactgaaaaatacaaaaaatttagccgggcgtggtggcgggtgcctgtagtcccagctacttgggaggctgaggcaggagaatggcgtgaacccaggaggcggagcttgcagtgagccgagatcgcgccactgcactccagcctgggtgacagagcgagactccatctcaaaaaacaacaacaacaaaaaaaaaacaaaagaaaaaaagtggcacaataaattaacaaatagcatgatcatcactttcacatacgtatttataaaatacagggtagaattattaaagttctctgttagtggcttgcatctcctgttccaaacatttccatattaaaataaagatttatagttcaaaaagtacattgtgttaaccaaaacatattatgctttatactttaaaacagcacattagcaaacccatttatcacacacatgttcagaggtgtattgcctgggaagaaaaaaacaaaatataattcccaattatggtttaattgtactctgtgtagtatatataatgccttctgctttaattcgctccaatattggtccatagatctcctttgaaaagggccccattaggcctttggctccaatttcacctggaagaaaataaatgtgtaattaccatttcaaaggttgtgtcagaggttaatttccccatcaagagtctccacaaagaagcaaactcagagtcaatgaattcttggaggcctaggcattttttaagtagctgcttaaaaacgtcccttagtaaattattacttattcaacactttgtaaggaaaaggagttgattttagattgaaagcacagccggacctagggatattgtcagaacttgtacacttaactgcattaatttctgccaggacaatcagagaacaaagtaaagtaagaagtaaagtaaatctgactggtcagcttaacttgctaatgtcatttttttttaaaaaaggcaagacaccaacagaatgagttgtaacaggtttgattatatgggcacaggcacctgttagtatgactgaaacacagaacctgggcactctcactagaggccacaatgaccccaacttttatcacttacttcttcattgattcctcaataactaagttggtcatttaatttgacattagctgatatgctactatacatttttttttcattatttcacatttatatgctttgatattttctactcccctcattctttcttgagggtcaaacagaggcaatgcttattgaatgtctatgtgatcttctagggagagtggaggaatgaaatttttattcatttagtctaaaatatttattgagtactaataatatgctgagatatgaagactaataaaacttaacctatattcttgagaatctggagtgaatatctttttctattttagagttatcactcccaacatggcaaaaaccaaagaaagaaaggaaggaagttaccattccctggggacccctctatgaggtagcagcttcatgtattatatcagttagtgtcacaacaactctgaaacagggatggcaatacccactttaaatatgaggaaactcttgctcaaaggtgctgagtaacttgcagcccatcactcagccaccttggaactgagcggaagcggaagtcaggtctatctccaaagcccacatgctttactcatcaaaaggggacctcccaggcagtccgcgcttggatcttctaagatggttcacttttagtaaatgcctgtgttacgctcaagagcaattacttgatgtccaggcaccaaatggcttggaggtgaaacagaaacaggcttacacctcaaatgaacagacttaccatcaagcaacattttggctgccatggcggtgggtaaccccacggttttagccatggctgaaaagccattgatgtccccataagccacaagatcaatcgttttatgttctaaatgtccagaaggatgtctgattccaaagctgtctctcatcacaatcatatctttttcttcaggaccttaaaacaaataaagataagtaaaaataccactatcattacaactcaaatattgtctgtcatctcctcctgcccttctggtcttaaaagttttccctccttttatatatgatcactagacaattatttacacagctttttagcccaaagtcaaagtgaaaacctcaaggaaattagaactctgatctcattcctttatccggattcatgtcaccatatcctgtttacagacacaaaagcgctgctatagaggccttttagtgtgctccaaaaatgcttctttggcatttgcctaatgcattaaaaaaaaaaagtaatgtcgggcgcggtggctcatgcctgtaatcccagcactttgggaggctaaggtgggcggatcacgaggtcaggagatgaagaccatcctggccaacatggtgaaaccttgtctctactaaaaatacaaaaattagctgggcatggtggcaggcaactgtagtcccagctactcgggaggctgaggcaggagaatctcttgaacctgggaggcagaggtacagtgagccgagatggagccactgcactccagcctggtgatagcgtgagacaccgtctcaaaaaataactaactaactaactaaataaataaatagtaaaactattttttcctttcccataataactaagtttatttttacctaataattctcaaattcctccctctggaaaaatagtccaattgcccttttcttcatatcacatcttcccattcctgctgcttggggccaaccctccaatacgattatctgcactgactctatcttatgattcttctttaggtatatttagctaatacttcatggcctaccataggaaagcttcatgaccaaatgcttggagagggcatccagaatggactctgcctgaggaacttgttcatccccaagtaagcccaacctgaaaagcacaggagatggctgcattagttcaagtcctatacatgttctcatttgggaagcaaaagggagctccttgaatttaatcttgaaagggcagaattacaaggtggtaactcaagttgtaggattctcctaaaatgtaaaataacaataacaatagcaatgttttaaccttcagaatcttctccagactcacccaggcactgctccctggagcagggcagagatgatggattgtaatcccatgttcttacaaagatctttatgagattaatttataggttagttctccaacattaggtataccagcaggatgccacagcggtcatatgaaagaatgttttcatgtaatattctatgactactccaaatctcctacaggaaagcaaaaataccccactatgcttgggaactgagtggtaaagtgtttcgagataagcatttctcaaattctaattgccattgagctcctctctttatctactctttatgcccacatgaacatggcacatggtaatctctctacccacattagagcaacgaattaatcaaagacaaatgtaaaatatttaactttttctgagtagaaattagcaatcattgatccagtatattttgctctaagttgagtggtgggtgcctaccattcagcagcctccaactgggtattgtctcctcctagtttcttaagaacagcttccttcaacacatcatgctcagaggagggtgaaatcccaactaggtcacagaggagttgtttctggttagaaaaagaaatacaatatttctaagtccctaacaaatttttttttaattgactgaaaaattatcctactaaaacactgaacttcaaatacacctcaaattttaaaattaaaaataattggaaataggaaattgtaacacatacacacacatacacacatctgcatacctacacatcaataaatagctgctattccaaacgatatttcaccaataaaaatgggttttaagatcaactcaacacaaaacagatggtgcagttcttaccagcacattccctgtctttgtatatcctctctatcactatgtttttatccattctccccctaccctccagcagtccattttgaccaggataaagtggaaaaggcttactgcagtggttgccagtagcaacccaggttcttttgtaggttcaagagatgagaaagtccttgcaggtaataaaatctcaaaggaagaatacttaaacagtagccatagttttttctactttcaaaacaagactttttctaggttcccaaaggaaaagctatgctctagatcaggagtcaacaaactggttcacagaccaaatttggctcattgtctgttttattaaataaaagttttattgaaacacagtcatgctcattggtttatgtatcgtctatgggagaactgagtggtactgacagagaccgtgtggcccataaagtctaaaacctttataatctggtcctttacaaaaaagaccatccctaagaatgtctgcaccaaccttcccaaaccagctgcctcaaccccaggttctctctgcagatacttgttcactcctacccaacaagtaagtttatgaaaggtaaaacttaagattggaaaggttcacaaatgcacacaaaaaaaatgaatgtaaaagcaactggctaacacaaagaaatgatgaatgcttgaggtggtagataccccatttacccagatggggttattatacattgcatgcctatttcaaaatatatcatgtcctccataaatatatacacctactatgtacccataaagaattcaaaaataattttttaaagaaactagctagcaagaataccaaaacttttttttgagatgtaatggaattagcaacattggtccttttctccttgtgatacatttctggcatttctactggaatacaggcacactagtttaagttgaacaaccagctggtaatgagttaattctgagcagtcagtagaagctctacttcgcattcagttccaagcctccaaagttcattccaactctgaggccttaaggttttggtacaacaagagatagacgcataagctcggtaactgaaaatcaaatcactcatggttataagtaaccaaatgagagtactgacaagatttggaggttggaaatccagttctgtaatacactagtaactctcctggattctcactttcaggaagtccaagtgactcccatcactgggtcaccacctagacaactggaatagctcagagcttaatgcagagagcaaaggcatctcttatcacagctcaaggagcagtcaaatggtataagttgctgcgggaaacaggcctgatatgtgtcagccccacaccctctccattcttccacaacagtgaagggaaagggggctttggagttaggatttatcttcctgctcataagctaaaaaataggatcttttgcagatccaaagcagagttcacccccgaccatttcagaaggtatttctgaaaaggagcagatagaacgtaattcggagtcactcacccaggtgagagggttggcctcaggtctaaaggcaggaagcgcttctctgtttataagacctaattttacaaatccattcaaagctttcatatatccctgaaacaagaattaataagcagtatataaaatttttctcttccaatgaaaaaacttaaaatatttttgaaaagagggatatatctttgtaactaatttagaaaactgtttatattgatgatatgagtactacagctcttctagaatttgcctagcaggttttcctgtctttactagaaacccctccccacaacccaccaaaaaagtattgaggatatagatacaaccaatttcaagctcaaactgagatcaatagtgtcataacaattctactggtttacataaaagaccttgcaaaacttaggtctttacttctgtttctgggtaacatgtgaatggaattttcgggcagcataagggcaaattttcttatgtgttatatgctgtcagctcagcagagtattatttaacagaacagtcagttgagctctttcttataatggaaggaggaacttgtaagaatatcctcctcaaaagcagataatccaatctactaattagagccaccacccccaagatatatggagagcagaaaaagaggtaggaatcagagatttttctaagatatgatgatatcatcactctgataaaaattcctcatatgtccttcattgtctacaaagcaaacctgaggtccttggtatattatataaaacccatcacaacatgctcatctagcctaactcacagatctccactttcactattccccaaatgtgctgtgttcttccagaaaccagggcctctgtacatgctgctcctgtaactggaatgttgtggccacacttcttcatttatgaaatgttttctcctcccttcagacccagtttagcacctcttgtgagtcccctagcactcacaagtgggcactcccttcttgtagcattttgtatatacctttatcatggcaattaatgcagctcataattaattgtctattcagctgctgtactgaaggtattgaaagcagggaaattgtatctttatattatgttatattatattttatttgtgtgcatattcttcatcccaatgcccacttcggggcagataagtcaaacaaataatgcctagtccatggtgaacaaaaatgcgtcaccactgacgactaaactgtagtagagtattatattaataggtgctaggttagaggaaaacatagctgtgggagcacaaaagaaggggaactcacatagatggggctgggtggttcaaggggaaggagttagggaggataccataggaaggtattcaacattattcaacattccaatccattattcagcattccaatccctaaaagagaacaaatggctggataaatagattctgaataatagatgaagtgaagaaagaccataatggtttattccccagtgtgcaaatgggaagcagggtgagaaggctaagataagaaatttatcttatctgcaattactgctcaagcagagagagagagaagaaaagagagagagggaaataattctagggagcaacagaggttttaaaatataaaatagttcctgtaacgtcagatatttcactactgaatgtctggccaactagcaattttcccatttctaaaggttatattgttcaaactgttcaaaggttactaaaaaaagaattctcatttgctctaattcaaatgcaaatatacttcaaagaggagaaacagaaaagtaatatcactagcttgtttagctcgcttctgggacctgataggtgctagagatccctttatccaacatctaaaatactgatttctgagctatttattaatctcagaaatatatttttatgctgacccctagaaatgaatttattttatgtattcattcatcaataagcatttagcaaactgctgccatatgtcagacttgtgctagggactgaggccacagagatgaaaaaattgcagtctcatccatgcagaaactgcagtcaacagaagggtcagataagtcaagcaaataatgcctagtccatggtaagcaaaaatgcatcaccactgatgactaaattgtagtacagtattatattaataggtgctaggttagaggaaaacatagctgtgggagcacaaaagaaggggaactcacatagatggggctgggtggttcaaggggaaggagttagggaggataccacaggaaggtgctattaacctgcgtctagaaggacaagcaggtgacaggcaggcagagaaggagagtggtcaaggcctctctgtcatatttgaatgatggtatctcatctccaatactggaaagaattttagggttaccaatggattgctggcattgcccaggatggtggccctcatgattacgaacactgtgatatcttccatcctcaaggaatccatggggatggctcccactcgcacaccttgttgagacctttattcaatgtttaaatctattaaaatccttcattcctggatctatatgtttgtcaaaagactatactgaaagctatatatcctaactgctggccaaaaaaaaaagtttttactcatattctttgaacaaattgaagaaaatagatcaagaaatctgccagagctggggatagtatgcataagttcagactagaatttctactgtgcctaaaggctggtagaagagccatagctcctagatctcggtaggacattatcactgatgtctcatttgattcctgggcaatgaaaaaatcatattcatggagtacaagcacctgctctctaggagcttacaatctcttttgggagataagaaaaatatacataaaattataacttaaaatgctgagaagtaaatgctaagtgcccataaatgtaacagaagctctcaagagtaagaaatatagtggttgttttctttttaagaacagataggcaggtgaacctggaagacattatgctaagtggaataagtgagacacaaaaagtaaaatattgcatgatctcacttacatgcagaatttttttttacgaaagtaaaagatgcagagatagagaataaaaccatggttaccaggggcagggctgcagagaagaaaagaataaagcccgaaggaggatgatacaaatacctggaggaaaagttccaggcaaaaggaacagccagcaaaaaaagataagagaacgacagaaaagcaggcacaagattgaagggtcatcactgacaggtccatgtgccttacatcttccagataaaaagataattagagaatactagataacacacatgagacaaatcccctctctggccttagccaggaaatctcacaagacagacagatttgcagtcaggtctctgatcctgagaaatacatgtattttaggtatgctggttacattaggttgagtttagggccctgtcgccaaattcatgggcatccacagcctcagaatatggcctcacttgaatgtttgcagatagaattaattaaggacctcaatatgaaatcaacctggatttagggtgaaccctaagtccaatgactagtgccctaataagaagaggatgcaacacagtgagacacacagaagaaggtgatatgaaactgatgcacaaattggatggatgtgtctcaaagtcaagcctccaaaaggcaccaaccctactcacacacatcttgatttcagacttctggcctcctgaatggtgagagaataaacccctattgtttcaagctacccaatttgtgatattatgctagaaaactattacaccagttgtcttgattaggtcacacttgtaactgctttttttgtgatcaataaatgtgtagtggacatttgcattaatgctcctagaatgtactccccattttgtggtttaaaaacattttggatttgctctggggaagcccctttcatcccgtccgtttcctcccgccccagtccatgtttttttaatgacattgactccatctccagttctaggacatataacataggccaaagtagatgggcacattttatcccactgaccttagggagctaatgagacaaaaatcgtatttttggctattagaacggtatcattttttattcccactgaatttgatcctgagaggctgggagcactgccaccactctgccatcgcacagcacttgaaactcctgtgaatactggaaagaagagctgagacgttacgagaagtcaggtcctggggaagtcacttgatctccaactctcactaagcctgaagccctgcctgtccccaactcctaatgagtcaattaattatctttttattttgaggtgagtctcctaaaatattcaatcaatcataagattcctgaaaaaatagactccaacttggtttatcatcttaattattttgactactaagaaaaattaagtgtacacatcacttacatcacaactggcaacatgttgaatctaaagtccagctgcttaccttatatctcagtgtcccccgcaacaaagtgtgagcagaagaaatgccataaatctcagcatatttcgtactgtctctgttaggatagccttccaaatttaatcctggaaaaaaatccatggacgtaacggcatcaagaaaggagatgcctcctgcaacattcacaacctgaggaacattgagaaggcacacatggggttacagctgttcctttcttttagggcttatctgcattatacgaacaaagaaagcaacagaaatttgaaaaaaaaaataaaaataatgaaaccaccataatcatcatcctatacttaagctgttctactaatatcataattcacaaagcaattcttctctcaagctttaaaatttgactttaaaacatttagtttttctaaacataaggtcttattttcaatttttttccttcccctggataaaatggcactaaattatttcccactagagtttgcctttttaaaaaatataaacatttagaaaaaaaatttaaaataaacattttaatttttaaaaaatttattttctaaatatttaaaaataaaaaatgtttaaaaaataaacaaaattattttatataaaaatgtttaaaaaataaacttaaataagctaaaagcaacagataattatttaaatggcttctatgctcaaacaacaatcaatattctcattcttttcttttactttcatgagccttctaaatgccacattaggcatcagtcacatacatttcattcatacagctaaatttattgagcagttactatctatgcattgaagatcgcacaaattgtgaagggaataacatgagtgatgaaataaaaatcttttgatatctcagtacttctctttcccatacccctacccccatcacacatactcaaaatgcaatgaaggatttctttgtctctaattttaattaaaagactaaattttcttctagtttattggcttattattattgttgagataaaggaaagcattctggagtgataaaattaggtctgagaattctggttgttgctgctggtggaactaaattttatccttattgtaccactggaaacaatttctgaccagtttctctaaagctgcacaaaataacactgtaccagggagctgccaatgtactttaaggtggattcacaggatttgcctgaagaggcctttggctaaacttaatgattctcatgccttattagtagatgggttctgaacgtgcctttgtatgagagagaaaatggaaactcatttatctgtggatgaagccccagaaagaaaagggctatgctgactgcaatgttaggaccactggagtcttttcagttcagagactcactttggagagtgccaagcaccatttaaaatttcaaaagtgaaaatctgaatgaaggatgtgaggaatgccttccatttaattttcttgtgaaccctactagactgcagagtaaacatttccaaaggggggatgatttctgaactacttctttaaaaccagtttatttaatagaattctaaatttttgaaaaaatctaagaaagcaaatgttgggcatgatggtgcccacctgtaatcccagctacttcactcgggaggctgaggcaggaggatggcctgagcccaggagtttgagaatagcctgagcgacacagcaagacaccatctcttaaaaacaaaaaagcaaacgttgacttttagggtcttcacacccatctcatttctataacccatgacaattcttaagttttgtttgcttgtttgaaagtcaggaaaatttctgaaagaaaaattcaataatgaccacaatattctagcttaccaatcataaataaagcagcaagttcataagtctatcatgaaatccttacaaagaagatggagaaatgtcagctgaatggcaatgattcatttagtgagaatggcaggtggctaagcaacctgacccaaaaattactgggtaatcattgtcatttgatattcattcgtagttgtatttctagtggtatataatgtagttcaacaataagttctttcttgtttattattttattaataatttgaatgacaacagaaacatatttgtctgttttgcagagaatatacatttctttctgctctgacaatgctcaggctcattattcactgctgttgcaagcttctctaggtccaactctttcacacatacacacaaacacaaatacaaatctcccaagtagagagaatcactgttatatttgaataaatatatcatatatattcaaataatcacagtaagcttgatcactaaactaataaggaaatatacaatcattttttcagggcctactatgtgcccagtgccttgtactgggcattatctttaatccatgaaacaactcatttttcagaggtgaaaactgaggctgagtcacccaaaggcaaatctgaacccagttctatttgactgcaatgtctgtgttccttcaactacactgtccccttaatcatgcttatttctggatcagtattttgaaagggatattgacaaagtacagcattctggattatgccacctgggatgcactgaaagttgcataaagaattggtacaggcaaaggaagatagtggtagctcttgatttccaaagggttgggtgctgcagtcaaggtggtggcaggcaatggatagagggctagaaaacttatcttaaagcgatgtttgcagagcaagcacacttctcacttagactacatgttttgccaggttagactgggaaacactgcagaagatgatggcaaagctctgccatatcactcccaaatgccaacaatgtaaaaaagtacaccaccactgtgaggggaatgaaactaagagaagatgaaatcactgtctccgaatatgtggaagaaaatcagaattgttaggaatcaaattagaagttagaaatagtacaagtggctagaaattactacaaagatgtaagacaatgagacacattcaaattcataggccactgaccaatttctggaaaagtttaagtcttcaaattcaagcagaagtcagagaggtgacttggtttcccattatgattctgtgaattacttaagacccgctccacagtggagggtggtgatggcagagggagtgaagggcaagaatacaagagaggttttaagttgttcaacaatctggcttgagaaacagactgatacacttgaattactgactgaataatgcagcacctagaaaattcttaagacacagacaaacaaagtgtctgattctttgattcagttcaggcaaaataatagtgaacagaggctggagtggtcacaaaaagcttcatccacaagaggaaacgcaggtgggaccttgaaaaaagtatcattttagcaaagaaaagtgtcatattttctcttggtatcctccagtgtcagagagatgcaaaaagcactcatttttacaaaagacatttaggatgaaagaggagaacttcgaattcaacaaatacaacttctgctacctgaaaataacctcttgtttgtcttaaactctcacaaccactaatttccttatgtagctaatatttgctagatttattacatggctgacaatctgctgttaggcagattgcaatctatgtgacctcactgactaagaacactggaaggctggcatgattgtctttatcttcagacaaggaacccaaagctcacaaccagtaatggcagagctagagcacaaagccaggcccacagataccaagttccttgctctttcttttacatggttgcactctgctgaccctttcgttgttaccatctttagcatttataaggcctcctaaaaataagtgttttactcaactgaggcaagaatttgtcctgccttcacatgttaatttataccaaacataggccagtctcttaagattgcagaaggtaaaaggagctgttggaatgcaataggagataggctgtagcatgtaaaaggatgtgtgcttggtaaaacatcagactaagattctggtccaaaccttcatgattcatagaattaaagaattggatggaacatcagtgctcacattacacatcaggaaactgacatccggtagatcttttcaactgcctggtctttggctatgttatgagggatgccaggaattagaccagaactcattgatcctgtttattatcctgaaacatgtcacacatcattccggcatcaagctaaagtgtcctgcttgtttagtactattttaagtgcagctgtgattctctgatcattaaatcagttgttctcaaattcagctgcatattagaatcactaggaagatttaaaaaatcctcaaacccaggcaaatcagaatctttggggatgaggcgctggtactttttaaactccccttgtaattccaagccaagtatgagttatgctctatatcacaggcacaaaagaccatggctaataacagcattcaccttgttgcttaagaaattctttctctctactcctgaaatacatttcgattcacaaataccttgacaatgtaaaatattgatgctaaaataatctttttaagacacatctatgtgatcatattactcatcactccctgcagggccaggactagggcaaggtgaatgaggtgcctacaacacacaattcaaagaggcactctgagtctcgtttcatttttctccaaactatgagcataaactatgaagtcagacagacatgatttggatactggctctgtcacttgccatctctttaagtgtagctgttatcttaactccctaaacctgatttttccccttataaaactgtcataccatgagtgctaacatccctgcctagctggcaccctcatatccttcaaggccaagcacatcctcttctccactagtttttcttttccccatcctccttcccccaaccccttcaccaaggccaattaaactgttctcccatctgtagctctgagccactttaacatactttggaaatttccctattaaattataattacttattcccatgtctgtctttccagccattaggcaatctggcaaaaggagaaaaaaagccttaagagttagttagacctgggtttgaatctcagccaaatgaccttggacatgctctctgagccatagctttcttattgtaaaataatgaaaataatattaaacttggagagttcttatgctctgttacatggcagctggggaagaaattatagtttctttccccagcacaccaaaccctccattccaagagccccatccccagtccagctgtgagctttctgaggtcatgaatttcattctctgtgacagtcttgggtaacttgcccaaagtccagcacatagtaggtactcagaaaatgtttgtcatgctgaaataaatcaagagataaccagtgtttacatatatagagaagtgaatttttgaatagcagaaacaacttgcaagaaggcctagggcaaagaataggcacaggctttgctaggaacagcaaggataccgtgctaaatagaacagaaaatatacactgggaaacaacacaggaggagataatggagacaggcagcatcaccattattaaagggtttgggatcagggagtatttagactgtctcaggctgttattgcaggttgatatcactatgcttggataagattcctcacctttccatcgagcagataggtggcagactgcattacattcatcaaaactcccactggactccagctaaatttatatctcaatggattgtttgaatgttcaggggctggaagcccaccacagtaggaaatatatgattcaatctataaattaaagaatcaataaataaggaagaattcacaacttagagaatgtctaagtaattaattgaagacaatgatatgaatggagtaaacttgctacagtttttcattcttaaagttactaaggcattcaaaaatacatcttcaaagcatgtaccatttgattaaataacagttaattttatatatatgtttttttaaaaaaactgtaaaaatagtgactaacattttgttcagttaaaaatccaactcttagttcaattctgcttagtcagttcctactaacttttgtattcaaattatatatttacatatatataattttaatacatatatatacacacacattcaaaaaacctaaaacaatctgaatcatcccatttacacccaatagtacctcgccaaaggtactatttcataaaagatatttcatatcaacagattgctgatacccaaagattcttcttacttttaaaagtcaaatcttattacagaatcttcaaggtagtctaaaatttgtattaagccaaaattttatagtagcatctgtttctccaaaaattggttgctacctaagacttggacattgttttcctgtatggatatttttgcagttataagatattatttaaaatttctgggaggctgaggggggcagatgacctgaggtcaggagtttgagactggcctgaccaacatggagaaaccccatctctactaaaaatacaaaattagccgggcatggtggtgcgtgcctgtaatcccagctacttgggaggctgaagcaggagtattacttgaacctgggagatggaggttgcagtgagccgagattgtgccgttgcactccagcctgggcaacaagagcaaaactcagtctcaaaaaaaaaaaatctttaactttgattaaaggtgttgctatattataactcatactttgattctgtacacaagaatttagacattttaatgttgcctttgggtacaaattgggctcaccgtggctcccacttccttggctttatctattgtttccattgctaacatgtgatccagaccagggtccaatcccaattcaccaatgattgtgatgccagcatcttccacactgcagcaggtggaaagaggaaaaaggaaaacttggatataaaataaaaacaatgccatggatccactcagtttgtttaaaatgattaaaacttacctcttttccaattcttttagtgctggtgtgatgtagcttgcagtgaccatgttaactttgtttgtgatgcaggccttggccacaagagggtgcaatacataaggcaacaagcttgaaaacaggaagaaactaatcagaaactccctttttcaactctactttctaaggtacttgaactgtattaaagctgcatcttaaggtactgttctgattaaattattctctcagaaaagggaacacttatacactgttggtgggaatgtaaattagttcagctgctacagaggatagttcagagatttctcaaagagctaaaggttgaactatcattcgacttagcaatcgcattactggttatctatccaaaggaaaatagattattctaccaaaaagacacaggcactcacatattcatcacagcactattcgcaataacaaagacatggaatcaattgacatgcccatcaatagtgggattggggccaggtgctgtgcctcatgcctgtaatcccagaactttgggaggccaaagacaggtgagtcgcttgggcccaggagtcgagaccagcttggacaagatggtgaaacatcatctctacaacaaatacaaaaattggcccagcatgttggcgcatgcctgtagtcccagctactccagagactgaagtgggaggatcacttgaactcaggaggtcaaggctgcagtgagttgagatcacagcactgcacactagcctgggcaatagagtgagaccctgtctcaataaaacaaaacaaaatgaaacaaaaataaaaaaacaaaaaccgtgaattggattaaaaaatgtagtacatatacaccattgaatactacatagccataaaaaagaatgaaatagtgttctttgcagcaacatggatgcaactggaaactattatcttatgcgacctaacacagaaacagaaaaccaaatactgcaggctctcacttacaagtaagtgggagctgaacactgggtacacatggaattaaagatggaaacaatagacactgaggactacaagagggaagagataagaagtggagcaggggctgaaaaacaacctactgggtactatgcttgctacttggtgacagattcattgatactccagacctcagaatcacacaatatacctttgtaataaatgtgcacatgtaacccctgattgtaaaataaaagttgaaagtaaaataaataaatattcccttggaaagacgtgatcaatgactccctgtgggccacagaataaattcaccctgttatcacatctaaatagcaatactctattctatttacctgttgaggaataaaggcctgagaagtggttttattgtttattttgtttttttaatgaactagagaaaatctgaagtatgcagagttaatttgacaagtacaatgatgtagtatgatattgtttatgttggtttttatttttttggtggtactgcagacagctttaccaaatagtcagtaaaaaacaacttaaatattgtcatgtaattgacagggtattttattattcctacaatagactatggatatactcatttatataacactcatatttatgaaaatttgatatcttgtgattatgcagacccagcaccaaattataatcccaaagccaaaattgttgaaaacccaatcaaagttgagctttgagtacagcatcatctgttgttcaccctgtggatttttagccattctgatacctttacaccgatcaacaccatgaaagcctatctcctccttgggcccttcttggagtctactcaataatgtaatacatgggccatcttgacctagtttgacacttcctgatagccatttggaagatgtgaaggtaaaaagaacagcagccctattttagtggaaagcccacgacagaaaaccccaatccaaattatacctgcctctttaagaaatttctaaagagttattttcctccacaaagctttcccagatttccccaaagccagatatccttcctctgcatgcatccagttatatatttataacatttaatggaatttgctccattcatccctatatttctacagctaatgtattacattattgagtagactccaggaagggtccacggaggagacaggctttaacggtgttgatcagtgtaaatgctatcaaaatggctaaaaatccacatggtgaacaatggatgatgctgtactcaaagctcaactttgattcggttttcaacaaatttggctgtggtataataatttggctctgggactgcataatcaaaagaaattaaattttcataaatatgagtgttataaaaatgagcatatccatattctattctaggaataataaaatactctgttaattacatgataatatttaatttgttttttaatgcctatttggtaaagctgtctacagtaccaacaaaaaaaaataaaaaccaacagaaacaatattacactatatcattgtacttgtcaaattcattctgcatagttcagattttctctacttcataaaaaaaaaaaaacaataaaaccacttttcaggcatttattcctcctcaggtcaacagaatagagtattgctatttaaatttattataatgcagaataaaattgtgtatgtcttttatcagtatcaaaagctcctggtctctgtgtttttgtttccttaaaccaaaaataattactgctaacaaatttagtagacttttggaaaccactgagcaaaatactcgcaaaactattagaaccaaatattaatagaaaatgtgcaatgtcatcatcttaaaggttaaacagaaatttttaaatcacattctccatattaaacttgctcaatcaaaattttactaagatctaataatattttaaaactttggccttataataggctgagaagtagaatgataggactttgcctgtggtacttttttagacgaagggattagagttcataattcgtctcgaatatgatacagtaagcactcaatgggacatactcttaaattatttaagttgactccaacccaattactccaaaaggtcgaaaatgtcacttgtgaaaaatacacacaaaatacatgtggaattttcaaagaaacttgaaatcaattactactttgtattaaattaaaaactaaatttgaaaaattataactatgagaattgtacatattactaaacattttttgtgaaacatattctttactcatttttttgtagtccctatcactgtggttatatcaaaacattctttccccaacttaaaaaataaaacaattagccaggcatggtggcttatgcctgtaatcctgacactttgagaggctgaggcaagtagattgcttgaggagttcaagaccagcctgagcaacatggtgatatcccattgctactaaaaatacaaactttagctaggcatagtggcaagtgcctgtagtcccagctacttgggtggttgaggtgggaggatcacttgagtctgggaggtgaaggttgcagtgagccaagattgtgccactgcattccagcctgggtgacaaaatgagactgtctcaaaaaaaagaaaaaaaaaatttaaggaatgttataggataacattgtttaatggcattaccattattcagcatagaaaatacaccaaatgagaaaacattaaatataaaacagtttttgctaatgctaaatcctattgaaggccactagtttgctaaattttaaaatttggacatattaagagattgatgtctttgtccattatcttgtcacattttatttcagattctgttccaaatggattttatcatgttattttacttttaattaaaaatgatatatttagatacctctgtgtggcaaaataaattattgttctactcagaaggctagatcattctattttgaatcagaatttcttttcatggtaatatcagagaggttcagttggtcattagtcaattttttctaaataaaaattaacgctcataacatttatataaattgagtaacattttaagtgcataaagttagcctgtatttaaagatatcaagagaaatgtaaaaatgccagcctacagaactacctttcattatatgttttccaagcctgcttttttttttttaaagcagaacatcacagaacttcctccaaagatacaatttgaatctgatctgtgaaagtgactaggtaatcactatgagggaacagataactttcttcttctcatcttgggaaaattctaggaatgaatgactattttcatcactttgacatttcaaaaccaaatttatttatttatttatttattacttttattttaggttcaggggtacatgtgcaggtttgttatacaggtaaattgtatgttatgggggtatggtgtacagattatttcattatctaggtaataagcatagtacccaatgggtagtttttcgatcctcaccctcctcccaccttttacccttaagcaggccctgatgtctgttgttcctttctttgtgtacatatgtactcaaatatcaaaaccaaatttagttataaagtgaatctcatgtaattctgtgtctagatgttagatctgcatttttgttagtaatactctatttcaggatctgttgctatgatgagacttaaaatggtcataaggctaaataatctacttattccatttaagctttataactccaaaggataaaatagacacttaagtatataaaacattaataccttatgacctgcaatcccacttctaagtacatacccaacagaaatgtataattactgttttagtgaaatggtcactaaaagacaaataccgaaatgtgtatagcagtgtgacttataatagccaaaatccagaaacaacctaaatatctatagtagtcaaataaataataatggtatattcacataatgaaatactatacagcaatgagaatgaataaattatcatttcagacaatagcacaaatgactcttgtaatcacaacattgaatggaagaaggaagccacaaatgaggatatattgaatgattccaattatatgaagtctgaaagcaggcagaaactaaatgtcagaagccaggatagtgtttacccttagaggatggggtaagtgaatagaaagaggcaccaggagggcttctggggaattactgatactcttgtttcctgacataaataatcatcacagaatgtgttcactttgtgaaaattcattgagctatatacttatgatttgtgcaccttctggacccatacttcaattaaaaactttactccaaaggagtatgaagagaggagaagtgaaagagaaagaaaaatgagaaaagaaataacaacaaaaatatgaaactcatttcttgccagatactgacctgatgacaagatcctgttttgccaccaagaagcccagcttctcttcttgtttacaaatgtccatgctaacaggattaatattatatttcttgcctaactgttcaatttgattcttcatgtcagatcctatttcagtaattaaaagtcacatttttagatatgtcagagtaaaatatattttaacatctccaaaaataaattttcaaatttcagaaacaaagtagtcttctaaaatgtagaagtcaacacgctataaaatacatttttcttcttcaaaaattagggcttatttacctactgttatttctatattgccatctcttgataaatattctaatacaggctcagatatgtagccagatccaagaaccaaaacctttctcctggtgcccattgaaagtgactgagcacgttccctatttaaaaaaaaaaaaaaaaaaaaaaaagggaaggggctaattaaaaatttttttttaaataacagaatcttgcattccacaaatcatactaaaacctaaataatgaagcaacattttctcttcacattacttaaaataagaatttcaacatgaatgagttccctataacaacatgtttctttaattattttacattttgtacaatgaagaacaatagacctgacatctctgagatatatatctacagacgtatagatgtatttcatgaattcccagtattactagtgaggtgcagatgctggacattttcttggcttacttgtgattgagtaacttggtctcacattttatccttccagaagatgtggttcaaaatcatacaaggggttttaccttggaaaccttatttattcctcacaacaatcccagaagacaacaatttgaggaagagaatattattatccatattagaaattgttttgtcatatatctttagagtcacttgaaaatagcaaaaccatgactttgagtcacacatgccatgggttaaatgtagaagctgaagactagtgttaggcattattttaattcttgaacagtctattctgctggaatttatattaataccttccaggcagatgactttctgtctttcccacaaactatgacctccaaggcagcatctaagacttacccatctttacaaacccattaatgctcagcacattttgtcttaaatatggaatttactcattaaatattttttgaatcaaattccctgttatcaacatgaaaccatagaaatggcctagtgccagggactgaagtaggctctgttatttagaatctttaggccataatgtctcttgaacattaacccaaaaaacttttcattaatttttaacaaataaaaataaatataagtataaaaaattcctgtccttctgtatcccaacacacatattactgatgtgaagaggtctcatttaactactaccatctcccatttcaccttccagagagaaccactattattcggttattatattttctgtctaacaatattttctatagtttgtataattaaaacattccaaataccaaatgctcaaaacagaaactcactcctagattctaatactgtccagcccatcagtacccccaaaccccagactccaggttaataatcacgtgctaagtgatgaaaagaagagaagaataaggcagggttcaatataaagtaaatttcctttcaaaatgcaacctttgttatcagtatcttggcacaagtttccatcaggaaagagggcagcaagttctagcaatcggagccaagtaaacctgctgcttcatgaaatatgacacataagagagaagatatcatcttgaccagtcatgttagacatgtcactagtttcagtagtgtaaaagaccatcggatgatgagaaccaaaacatagagctatgaaaaacaaacagatgtgaagttttacttgtaagaaactctcctacagggttatagagctagcttctcttattcacaaagaaaaaaagtaaatacttagtgtcttatgccagtatatttcactgacacattaaaaagtaactataatcaaaccagcacatatggaaaagcctaactatagtacgcttgatctgggcagatctctttgtttactgcttgtagtagaaccactgaaaaagaagataaaacagttgtgttatttttttttccaactctggtttctcctgatacttcagtacatgggttccttttttaatgtgaaaagaccagcagagtagatataaacacagatcaagggcaattggctggaggagaccagaatattccaaaaaaataaaatcaatgttttcaaactttaagtagtaaaatcaattaaggaaacaagggccttagctaaagacctttctaaagtaactattctcttgagtagatttgctacattactttttggcaccttccccctaataagaatccctggagaaaactacctcttactttcatcaattgtttattcacaactctcttaatttgtaaccacgaattcacttccctgaacattatactaaacaaaagagagtccaaatcctcaactaaaacccaaactgaaagcaccacagaaaggctagtgtgctcattttcctttgagaaaataaccgaggcatgatcatgtatcaaaagctagagaaaaacaagaagctacctgaaggacaatccttttggatttttgcttgcttacccatacgtctacacaggctattagaaagccaaaatgacgctatactactgttaagtgggaaacagtcacagtggtttcagccagccacttagtttggatttcctacattttcaaacattatcaaaatttatatagtgtacaaacctaatattaagaactcccattgaagcattaaaaaatactcatgaattccaagataagaataaatgtataaaacaagaggatttgaacaatacttacctgctctcccggagtgtctggatatatttatatttatcaggtaatgtaccgttggatgtaatcactgcctaaatgtatatgacacaagacatttctttagtatccacattttagtcctacaaacaaggtgtcatgactgatagagaaaagacagaatgacaaagatggagagagagagaaacagagagaagagagcaaaaatggtagtaaaaaaatacatttatgaaaaaatattctgctcataacttacatctctcaccacaggagaaaaattctgactttcaagaggctgtgtcgcgtctgataatatctgaaaggaaaatgagatttgtaagagataaatgacactgcaaagaaggcctcttggtgtttgtatccatattaaaatattaatcaagggaaaaaaataatttaagaaacagttttctgaggatcaccgagtataagtgattgctaatagaagtcttctacaagcaatcaactctgcccacaagactatggtgtttcagcacaagtcccaattttaaaactaaaattggattataatcatctttgcttgctgtgaacacaaaaaagcttatcctttccaaccagttaaatgtatcatattaagcatgttgtcaaatatcttcacaagctttatagctatagtcctcccttcaagggcctctactccattccaaaagttcaagctgttctattaggaatagagaatgaggttttccactcagcaaggccaccaaccctgcagtaaggggtctccctcagatcagtatcagtattagtagttatatgtataggtacatcagcatttcaaaggtggtagcaaaagtgacttgactgagtagacctagaaagtcattcacaccctcttcacattatcttgcaaaattgagtcagagacaacaaaaaaagtaagatgtctcatgttaacatttcagcaaccttctagtcctcctcttttctcccaaggaacccaactcttgaatatactgccaagaagtaatgggcatgtaagttagtccttctcaaagaacccaattcttgaatatactgccaagaagtaatggcatataagttagcattgctgtttctggtggacagggaagagccaatgagacaatctttcctccctaactataggttaagatctagctctctcacccaactaagaacaagaaaaatgttcctagaaggtgctggtaacagagaatttatttactgtattaaaataaatagaaaatggttttcatgtatctaaaataaatggtaatttgaaaaaggtcagttctccaaaggactgaaacctagatttaaattacttcatcctaactgaatttaggtgaatttctcctaacctttacccttgtctatctcactgcccaaaacaaagaatatattatctggaggaaaatcacacaacatccagagcctcgagtcatctctaaaattttgaatacgcaatgtctggcattaaaccaaaaataaataaatatattgaaaggtaagaatttactgaaaaccataaaaaccaaggaaaaaaacagggaacataaatagaaccaagaagtgtaatggaattaacaaaaatgattctaaattgtgattaatatgttcaaaaaataaaaggacaatatagataacttttttaaaaaatgtaaaactttaaaattagtgaatataagtttttgataaatgaaaaataacatgtttcaagccttggaagacagatgaacatccaaatatatgaagctcaacaatctccaaacagagttaacccaaagaggtccctttataattactgtcaaaaaccaaagacaaatgatattaaaagcagcaagataaaaatatcatgttacatataagggaatctccattagactatcagcagatttctcagtagaaatcctgcaggccaggagagaatgggatgatatattcaaagtgctgatgcacagaaacctgccagccaaaaatactatacacagcaaagctgtccttcagaaaaaaagaagaaataaactctttcccagacaagcaaaagtttagggaattcttcaccactagagctgctctataagaaatgcttaagggagtttttcaagtagaaaaaaagaacattactaacatgaaaacataaaaagtaaaaaaatccactgataaaggtagatatatattcaaatccagaataccctgatactactatggcactctgcaaaacataggtatatataactctaggatggaagttaaaattcaaaacagtcaaaaataatgatagctacaataaagtattaagaaatatgtaagctaaaaagatgaaaattgtgacatcaaaaaatattaactggttgcacccaactcagaaaggtaaaaaagaaatatgaatatatgtacatatacatatatatgtgtgtatatatactatatatactatacacacacacacacgctggtgggagggtagaattctacagtttttgtatgcaactgaatttaagttgttattagtataaaatagtctattataactataagacattttatgtaagccttgtggtaaccacaaagcagaatactaaagcagatatacaaatgataaagataaaagaatacaaatttagcactaaaggaaatcactaaatcacaaagataaacaggagaggaaaaaaagaacaaataagctataaagcaatcagaaaacatttaacaaaatggcagtagtaagtccttggcatatcaataattactctgaatgtaaacagattaaattgttcaattaaaacacagagtggctgaatggattaaaaaaacaaagctctactattcacaatagcaaagttatggaaccaatctagatacccatcagtggtgaattggataaagaaaatgtggtatatatacaccatggaatactatgcagccataaaaaagaatgaaattggccaggcacagtggctcacacctgtaatcccagcactttgagaggccaaggtgagcagatcacctgatgtcagaagttcaagaccaccctggccaacatggtgaaaccctgtctctactaaaaatacaaacattagccaggcttggtggtgggcacctgtaatcccatctactggggaagctgaggcaggagaattgcttgaacccaggaggcagaggtttgtgaaatgagatggtgccactacaccagcctaggtgacagagcaagactgcctcaaaaataaacaaacaatgaaactacgtcctttgcagcaatctggatgcagatgaaggccattatcctaagcaaattaatgtaggaacagaaaaccaaataccacatgttctcagttataagtgggagctaaacactgagtacacatggacacaaagaagggaacaatagaaaccagggtatacttgagggtggaggatgggaggagggtgaagactgaaaaactacctatcaggtactatgctcactactttagtgacgaattcatttgtgctccaaaccccagtgacatgcaatttactcatgtaataaaactgcacatgtacccccgaacctaaaataaaagttgcaaagagaaaaaaaaaataagctctcactatatgctgcacacaagagacacactttcaccttaagaatgcacataggctttcatccctcaaaggggatgaaagaagatattccttgcaaataataccaacagaggacagggacaatacttattctagatagaaaaaacttaacacaaaaattttcacaagagacaaagaaagtcattattaaagagctcaagtcattaagaagtcatagcaattgtaaatacatgtgcactcaacattggaacacctaaacatataaagcaaatattaattaatcaacatgaaggtaaaaaatagataccaaaacaataatagtaggagacttcaatacccctctttcaaagatggaaagatcaaccagaaagaaattaataagaaaatactggaattgatctgtgctttagacaaaatggacctaatagataaatatagaactttttatccagtagcaccagtgtacgcattcttctctagtacatatagaatgctctccagaatagaccatatggtaggccacaaaatatgtcttaacaaattcaaaaaaattgaaatcatattaagtattgtttctgatcacagtggtatgaagctagaaatcaataacaagagaaactttggaaactacaaacacatgcaaattaaacaacataatcctcatcaatcaaggagtcaatagagaaactaaaagggaaatttaaaaatttctagagacaaatgaaaatgaaaacacaacctaccaaaacctatgggatacagcaaaagcagtactcagaaggaagtttatagcaattttgaaatgcctatttcaaaaaagaacaaagatctcagataacccaatgttgcacctcaaggaccaagaaaaacaggaacaaactgaacccaaaattagtagacacaaagaaataatgatggttagagaagacataaacaaaatagagacttaaaaaatataaaagatcaatgaaacaaagagtttgtttgaaaaggtaaacaaaatcaacaaaccctgtgtctgcctaaggagaaaagactcaaatgaataaaattttagatgactgttgttggtgtgttgaaatgctagtgatttttgtatgttgattttgtatcctgaaactttgctgaaattgtttatcagcttaatttttgggctaagactagggggttgtctagatatagaatcatgtcatctgcaaaaagggataatttgacttcctctcttcctatttgaatgctttttatttctttctcttgcctgattgttctggccaggacttccaatactatgttggatgcaagtggtaaaagagggcatccttgttgccagttttcaaggggaatcaatgttattaaaatggccatactgcccaaagcaatttatagattcaatgctattcttatcaaattacccatgacattcttcatagaactagaaagaaactattttaaaattcatatggaaccaaaaagaagcagaatagccaaggcaatcctaaacaaaaaaaaacagagctggaggtatcatgctacctgacttcaaactatattacagggctacagtaaccaaaacagcataagactcgtacaaaaccagacacaaagaccaataaaacagaatagagagctcaaaaataaggccacacatcttcaaccatctgatcttcaacaaagctgacaaaaacaaacaatgaggaaaggactccctgtttaataaatggtgctgggataactggctagctatatgcagaagattaaaactggatcacttccttacagcatataaaatggtgtaaatcaactcaaagtggattaaagaatgaaatgtaaaacccaaaattataaaaaccctggaagatgatctaggcaaaaccattctggacatgggaactagcaaagatttcatgatgaagacaccaaaaacaaatgcaacaaatgggatctaattaaactaagggggttttgcacagcaaaagaaactatgaacagagtaaacaatctacagaatgggagaaaatatttgcaaactatgcatctgacaaaagtctaatatctagcttctataaaaacttaaatttacaagaaaaaacaaacaaccccattaaaagctgggcaaaggacatgaacagacacttttcaattgaagacatacatgcagtcaacaagcatatgaaaacaaattcaacatcactgataattaaagaaatgcaaatcaaaaccacaatgagataccgtctcacactagtcagaatggatattactaaaaggtcaaaacataacagatgctggtgaggttgtggagaaaaacgaatgcttatacactgttggtgggagtaaaaatcagttcaaccattgtggaaagcagtgtggcaattcctcaaagagctaaaaacagaactactcttcaacccagcaatccattactgggtaatatacccaaaggaatataaaatgttctatcataaggacacatacacatgcacatgctgttgtaaagagtgctcattggagcgctattgtaaatagcagagacatggactcaacctaaatgcctataaatgatagactgtataaagaacatgtggtacaccatggaatactatgaagccataaaaaagaatgagatcatgtcttttgcaggaacatggatagagctagaagccattatccttagcaaattaatgcaggaacagaaaaccaaatactgcatgctctcccttataagcaggagctaaatgatgaggacacatagacacatagaggggaacaacacacactggggccttcctgagggagaagggagaggagcacaaaaaatgactattgggtagtaggcttaataccctggtgatgaaataatctgcacatccacccctcgtgacacaagtttacctatagaacaaacctgcacatgtacccctgaacctaaaagttttttttaagtatgtattagcttctgcaacattattgcataacaaatcacccacaactcaaaaaaaaaaaaaaaaacacagatgaaaaaggagacattacaacttataccacagaaatacaaaggatcataagagagcattatgaacaatgatatgccaaaaacttggaaaacctagaagaaatgaacaaattcctggacacatacaacctaccaagattgaaccagaaaaaaataaacaatctgaataggcgaatcgataacaagcagcaagattgaatcagtaataaaaagtctcccatcaaagactagcccagggcctgatggtttcactactgaactctaccaaacatttaaagaagatttaataccaattcttctcaaactattccagaatatcaaggaggagggaattcttccaaactaattctataaggccagtgttattgtgataccaaaatcagacaaggacgtaacaaaaaaagtaaacttcaggccaatatccctgaagaacatagatacaaaaattttcaacaaaatactagaaaaccaaatttaacagcatatttacaagagcattcaccataataaatgggattcattccaggggtgcaagaatggttcaacatatgcaaattaataaacataatttatcacattgacagaatgaaggacaaaaaccatatgattattccaacagaaacagaaaaaaatatttgacaaattcaacatcaccttatgataaaaactttcatcaaatttggcatacagggtacatacctcaacataataaaagccatatttgacagacccacagctaacatcatactgatcatggaaaattgaaagctttttctctaagatatggaacaagaaaaggatgctactattcaacatagtactggatgttctagtcagtgtaactaggcaaaaaaaaagaaaacaaaggtacccaaattggaaagcaggaagtcaaattgtccttgtttgaagatgacgaaatcttatatatagaaaaccctaaagactccatcaaaacactgttggaactgataaatttagtaaaattgcagaatgcaaaatcaacatacaaaaattagtagcatttctatatgccaactgtgaacaatctgaaaaaaaatcccatttccaatagccacagcaaaaataagatgcataagaataaatttaaccaaggaaatgaaagatctctatactaaaaactgtaaaacattgatgaaagacattgaagaaaacaaaaacaaatgtaaagatattcccatgttcatggaatggaagaatttatattgttaaaatgcccatactacccaaagcaatctaccaattcagggcaatccttaccaaaaaaaaaaaaaaaatgataatcttcacagaaatagaaaagacaatcctaaaactagtatgaaatcacaaaagaccccaaatcgtcacacaatatttagcaaaaagaacgaagctggaggcatcacactacctgacttcaaaatatactacaaagctatagtaaccaaaacagcatggtactggcataacagcagacacataaaccaatggaacagaaaagcaagcccagaaagaaatccatgcatctatatccaccagttttggagaaaagtgtcaagaacaaacattaagggaagaagagtctcttcaataaatggtgctgggaaaattggatatctacattcagaagaataaaactagaccccctatttctcatcatataaacaaatcaactcaaaatggattaaacacttaaatggaagacctaaaactatgaaactactagaagaaaaaaaaaacacaggggaaatgcttcattacattgacctggttaagaattttttggataagaactcaaaagcacaagcacaaaacccaaaaacagacaaatggaattacatcaaactaaaaagcttctgcacagcaaaacaaacaaacaaaagatcaattgagtgaagaaacaacagaatgggaaaaagtatttgcaaactatacgtctcacaaggaagtaatactcagaatatacaagaaagtcaaagaacaaaacaagagataatacaatcaaaaatgggctgtactcaaagtaaatctaatggctttaaaatgcacatattgctaaagagaaacacaggaaaacaattacctaagcacttattgcaagaagttatgaaaagaaaggttaactaagctctcaataaagtaaaataaagaatatagtataggtaagattataaattaagaaaacagaaaatgatataaaatagagatgatcaccaaagttgaactgattttttgcgatgactaataaaattgatcaagtccaggtaaaacagattaagaaaaaacagaaggcatacccaaccaacatcaggaaaaagagaaatcactacagaatctattaaagagttaataaggttattactaaaaaaaaaatgacaataaagtttacaacttagatgaaatataaattcctagaaaataagcataccaaaattgacaaagaaaaataaaaatctgaacattcttaagtttttaaataaaatgtaatctataattttaaaacttacccttaaaactaaaaaaagaaacaaacaaaaatgctaccaacccaaatagttttgctaatgaattgtatcaagtagaactaacactaatctcatgtaaaatgttcctgagaccaaaaataaggaaatactctctaacttgttttcaagccaacataaacttaatatccaaacctgacaaagaccttataataaaataaagttatagattaagctctctaatgaacatagatgttaataatcctaaacaagataaatctatgtgcaaactcaacaaaataatgtggagatatatatatatatatatctccacaaccccaaatgtctaccaatggtaaaatagattaataaatgttggtatatttcttagcaaccagaacttagtcataaataaaaggttaacatacaaccaagttggatttatcctaagactgtgaagttagtttgatatttgaaaaccaattgacacaattcacatattaacagagaaaaggaaaaaatgatcttctcaatgaatacagaaaatgcatttgatacatgtacataatatccacatcatccaggccataatccagaattattcagtctatgaaaaccagaagactatgaccaattctcaaaggaaaagacaatcaataaagttcaaccacaaattgacccagaaagttggaagtatgagatgaacattgtaaagtggtttttataactatgttccatgcaataacgaaaaatacactcataattaatgaaaagatagaaactctctgcagaaaaagagaaaataccaaaacaaaatttttaaaaaagaacccaatggaaattctagaactgaaaatagaacatcggaaattaaaaatgcacagaaatgtctgattagcagaatagagaatatgaagacattttcagataaaggacaactaagagaatctgtcatcagcaaacctgtactgtaagaagtgataaattaagttattcagtctgcagggaaatgatgccaaagggaaatgaatgaagaacatcaaaaatggtaaacaccttggtaaatatattattgtattttttatatacatacagtttggccacttaaacatttaccattataaaattttagaagtagagaaactgttaagattatgtattcgtggctgggcgcggtggctcacgcctgtaataccagcactttgggaggccgaggcgggtggatcacgaggtcaggagttcaagaccagcctggccaacatggtgaaaccccatctctactaaaaactacaaaaattagccaggcgtggtggcacacacctgtggtcctggctactcgggaggctgaggcaggaagaatcgcttgaacctgggaggtggaggttgcagtgagccgcaattgcatcactgcactccagcctgggcaacagggcgagaatctgtctcaaaaaaataaaataaaataaaataagattatgtattcattacaaccacctcatgttacagatgaaatatctgaggctcagaaaggaagtgagtgccctgctcaaggttataaagcaagttgatatctccagcaaagcctggcatttgtactctccttctcctgcttctttaatgcctcagcaccaactccagacacattgcagatccagcactgactgtatcagcaacacgtccttaacttctctgtatttgttttataatggatttaatgatggtaaaatggatttaatgatggtatttacctaatacggttttcatgagtacttaaaattaaaatatatttagtactttgaacacttcctgcacctagtaggtgcaatatcatgtctaaccatgacagtgcctgctgcctgcattttctcaagcctgctacatctccctgttgacatattccaataggaaaaagaaagggtcaaaatggaatactatttgaaagaaaagaggatcacagactggaaatttcatttattcttgccccactaactattgttctattttagtgtaagagcttatgagggaagatatagatgaaaagagtaagagccattctttatattggaatcattggcagaggcagacagtctgaaataaaaataaagcaggaaggctatgaatgcttaggataaaaactgaaataagaaaaattttctttgataaagaaaatggaatttagataacatggtatttcattagctaatcaatgatcacagaagaaaaatacatgacctcaacataagctgtcacttaactattagtgaccagaacccaataaaaatgttctatatttctaatttttcagacctggttattacggcacaataagagtgccccaatatgaactgacatagatggcaaaaaattaaaaataaagcatgttttatctcacacgtggtgaacattcttaataaaagacctataatgggaaagagatgtaattgtaattaagcatgaaggcagtgatatcatcctataccccaagagacaagtaagcagaatatgtcaaataaaatagtatcagtaagtatttcagggaagggctggcatttcattttacagcagatttcttagatacagaagaccagaacattcacagaattactcaattattcaatttaaagccacagagttgttactgatattaccagtctgcttaccatttcttcaacataagggtaaagcatgtctccaaagcattctgtagcttcaattgggagctgtgccggcaaattgtcaatggaacacatcaggatccccgagccttcaacactaaaagcagcaatgtggtttattcagaagcacaaaacattatttgtaagttctgacttttccagatgtctactccactatatttgcttcattatcatttgtaattttgtataaaagtatacgcgaaaataaacaaaacttttcaaacaaaacgttttccttcttcagcaacccatctcacatttaaatatatttgtgtatgtgtgtgtgttcaaatgtgcatgtttttttccccaaattttagtatgtttgagtatatctctccaaattttcataacttcataaagatgtaaaatactgagaattttagagtagtatatcaatgtaactaagtgaggaatatcatctaacaactttagcaaactcacctgtcatgaataatatgctggtctgcatcatacatgcaaaagggatgctctattgttgtacactcagtcataaactctatagaccctcctgtgtcagctgaaatgtcacatattgccacgagtctgaaaataacatcaatacttagatgagaggatgaaattctgaagtctccaacaagactaaaaaaaaaggagtttggaacaattttcaatgtggatcccaaatattttccaggcttttggggtctttttcctatagctcattcttcaggactctgcactgttctgtgatacagagaatcttcccagtatgaattttagtctccaaaaaaaaaaaaaaaaagaaagaaagaaagaaaagaaaaaaggaaacaaacgcagaaaattgctttcctagagaaatcattaacagactaaagttaacatagttatctctaaataactcagaaaggttcaattatgctacctccaccctgcttagtactgtatagttttacatgtggttacacataaatctctagaattacgaacaaaagtttcagtccagcattcaaaaagttgactacaatttttctgcccaatctccaattaccacttgcatacatgaaccaatgtagagctagactgacacattcagcaccctaaatatgctttggtagctccatatttattaagcaccaatcctttcacttggaattcttgttctcctcattcctccctttaaggtttgctgcgcccaatgcttctgctttcttctaaaccctggtgatgttgttgctcctagcattcccttggcatttacttgatgccagttacatgcctagaaaagcagacatatcttttactcttccacaaatattaattaattaattcaatatttaataattatttcaatgcctattatatatcaggcaacgtactaggtgcttgtggccaagagaaagagaccccctatcctcaaggagattaagttctaggaagagggagaaaaatcataaacacgagaaaataaatgaggaatttcaaaacaaaaaacagagtaacagactagagatagagatgagaatggagaaacaagagaagacttctctgagcaaatagcttcagagctgcatggggcatcacagaagacaaaagaagaatgtttcaagaagtggaggtgggctgggcatggtggctcatgcctataatcccagtaccttgggaagccaaggcaggaggtctgcttggggtccagagatttagaccagcctgggaaacataacaagaccccatctctaaagataaatatatacaataaaattttaaaaaaaaaaggagagatggttaacagtgttgagtactgccaagaggtcaagaaagataaggcagagaagtagtcattagaaatcaagtcctctgatatgtgatatttgatcctctaataatggaagcagctggtcaaaactactatcgttgctgaagtagagtccttacttgtgtggtaatgcagggcagccttccacaccagcaggtgagaacttgcccggagccaggagactctgagcatcttggcgggttaggaggcgaggagtgttttgttcccagtagattccattaattaagcaagttgtatagggtgcaatctgtaatgcaagttccaggttcaagaaaatagaaaatagcctattttaatacagtatactgaaagaaagctatcagtaaattctatgagaaataattaaatgtaacttctaattgattttcttattgtccatgtcagtgtccatcttttgaggcaaagatattaaatagccacccagatttcagtatagaattaccctatgatagagaaatatatgactataaatacattagtgtgttcattctataatgtattgcatgccgaagaaaaatgaaaggacaaaaacaaaacaaacaaaaaacggtggacctaaaattatatttccagctctaatatcagtagggtatgacctaaatcatgctacctcaacttccctgggctctatttttcttacttgccagatggggataatacgcaccccattcctcaaaggaatgctgtgaagattaaatcggataacatctgtaagctctatggagcaatgtgctacatacatgcatacatggcaactaggtcagtatcagttttaggatgcatccaatcaccaatacttctgtgattggggaaatgagaaggaataaagatttcttagattccaaatttttcagtttgaaactatgttcataatttttcttcttcaaacatctcaagctgaaggtaagaattcttttccctaacatgccctgcacgatataagggctaaacttcataccagaatctgaaaatgttatgttggtcaaacatatttaaaattatttaaagcattctttttcacaataaatgcatgcattttttgttttatgtattttttggtttgttagtttatctgggggaagaatgttgcatggccaatgactatagagcacacaaatatattttatttcttataagatgtgtgtcgcatcgaaggatttgatttgtaagtgtaatagctttttcattcagtggggatggtctgcacttatataggaacgctatttaaccctcaccctgataatcaatggcatgcatttcaagattgctggctgagattatggttgcaatttgcggccatgttgagaccaaacgtcataggcattatgctctgcccacagtgctaactagtccaggataaatacagaaaacagtaacgcacaggaaatggcttagcgctattgggcacatgtagacctgaagcagaaatggagacagtgaaacaaagagtgtatccacagaaaccaccaaaagcactaagcgagactactccaaataccataaaagatgatagctccaaaggccaaatcatgatacccaaaggactcacaacaggaaaactgaaagccattgtacaattcataatttctctccttgaaaatagcctacctacactgtatcataagcaaccaacttaaaaggtgaatatgatactcacatcagtattaaaacgacttatgtagcgctccggatgtttgtcatactctgcaggatcatacacagcatctgttttcctgacaagatgatgatgacgacttaacaccgtcccatacacttttctgaggtcttgaaaaggagaaagaaattagtaaagtgggtgacaaataataaaaatttatggtgataaaatattataacatagactgttaaaaacattaaaagttagtcatctcctgtcccttacctccagtttgggaaacttcttttaattcatggggctccacatattcacaaggtagctcattaaagattgcttgggctccctacaaataacacatgagtaaaaatccaaaaatcaatagaaaaagaaccaacatggttttctgcaaagatctgatcattttcccaacaattacatagctccacttgccttccctacaaccaggactgcaacacagaaatacagatgagttgcttacaaccagcctgctagctagcttttattcctgttagaacagcacacttagaaagggctttaatttttttcttttttacttaagctactcagagtatcgataagagtgtttagaaatgagggaaaaatatttccatttattttagatccattgcagaaattatttcaaatggggaaattatatttcctacaaaagaaataatcagatgcttacctcacaatataataagaatgatatcctatttgtaaaatattttctttgaagcaggaattattttacaatgacaagtttctataggagattacaaacacattcttaaaaccaccagagaaggaagaaagcatgaattccagtcttaaatgaatcttcctaacatcttgtttgcaaaactccaagtagtcttaaaaaatggttatcgtgaggtcactttcaaactcgtggacattttggtgatggaggtaaaacagatcaccctcagaacagacctttacactgttaacaatgaattatcttatttatttatttatctatttatttatttatttatttatttattttattttgagacagagtctcgctctgtcacccaggctggagtgcagtggtgcaatctcggctcactgcaacatttgcctcccgggttcaagcgattctcctgcttcagcctccttagtagccgggattatgggtgtgcgtcaccatgcctggctaatttttgtatttttggtataggtggtgttttaccatattggccaggttggcctcgaactcctgacctcaggtgatccgcctgcctcggcctcccaaagcactgggattataggtgtgagccaccatgtctggctgaattatctcttttaaaaaaagaaaaagaaacgaagaaaaagtattccaagactccgatagcttgcaataaactaaaagctatatgtgtgtatgtatgtgtatagatatacacacacatatacacttacacatacacacacacatatatatacacacacatacacatacacacatacacacatatttagatcattactacttttcactatgagaaaaatacattggtaagaaaagtgcctaaaatagaatctccagtccatttgaaatacccacaaaatggctgcccacatcatttgggttagtttcaaagttttggattgttttacaaaaggaagtcaggtaaaagttaccttagaaacattaccagttcctgtgaacacaaatgttaagggtcctattgacttaggcatcaaacccaaagatatttcatagccagcatcacggacagcttgcacagcctgactgctattcctgtagttatgagccatgccaatgtgctgaaaacaaacatacacaactcaagttagtccaccagctcagcattttttttattattaaggtgtgagatgtgttttcaaaaaaattagcaaaataaacatctcttaccataaaaggtgtgtgatgtcccaaagcaaggagccttaaacccattccatgtaaaatgttgatcattcctgttacagaatcagaccaatagaaagactattagttgggaagaatttaagctgttctctctgctcgttctccaatctgcatggtgccctgcagaagcacagatcatgcatctcagatttagaagaggcctcagtagattgtatccatcctctcaactttctgccatcaaatgcactaacccaaatgcatccccacctattccttccaccttcaatcctgataaaataggaagaatgtttctcttcttatctaaggctaatctctccaccttggctccggatcccatcccttcctgtcacccaaggaatttattactgagttactcccctcactatccttccctattgcttcattcttatcagcatttaaacatgctcccatgcctcccataacaaaaacaaatgaacaaacaaaaacaaagtcaccattaaccctagggctcccatcatctatttagtgacctaaatagctaaactcagtgaacacattgtagatcagatcagaagtacttggcaatgcagacctcttctttgttgaaacgaagagtgcccctcagcatcccaacttgaaatttttaatcctacgtttctgtaggaccctcttcctgtggcaattccttttatattattcaccctcaggattatgtcctgggctctattttcttccatatctacatttgtcccttaggtaatctcatctagtcctaaatttcaagtactatctatatgcagacgacttcaagtctctctcttgaaaacagatctttcttttgatttcaaaacttagccagccacctttttatgtctgtctcaatttggatgttcttcagaaagctaaaattcagcatccctgcagcaaagacctgagcatccattctttccttattctttttaggaaagaactttccatgctcctccattccccatcctcacccccaacaaacatccctaccaaattttcttttgtcgtttttctaaagtcaacttataaagaaatagtttacatacaacataatgcacccatttaaaatgtatagtttggtaactgttaacaaatatacacatctgtgttattaccgccatgatcaagatacagagtatttcaccaactcctggtctccacaactactgatctttctctctctatagattaagttcttctaaagttacatataaacaaaattttaagcagtcgtctctcagtatatgcagggggttcgttctaagacccctacacatgttaatatctgggcatactcaagtcccacagtcagttctgtgacacctgcctgtatgaaaaggtggcccccgataaaggtggattttgcatcccatgaatataagcggactcatgcagttcaaactcgtgttgttcaagggtcaattgtactcttttacaatgtgtcggcttttactcagcatcgtgtttttgagattcatacatattttgtgtgtatcagtatagtcttttattgttgaagagtttcccatttctatttcagttgatttctctgctcatcatttgggttgtttccaggctattataaatggagttgctataaaaaaattctttgtataaaatattgtatttctcttaataaatgcctattagtggaatttagtttgtaccttgatacttaagttttcaatttcttcttgagctgattttggtaatttgtacattttgaaaatttatctagttcatcaaggttgccaaattcattgacctattcataatattcctttatccttttaatatttaaaagatatagtgatggccccctagtattccttcttagtaaatattgtcttctctctttttctatcagtctacctagatgttaattaattttattgatatttttcagagaaccaggttttggtttcattgattttctctattcttttcctgttttagtttgattaattttctctgtatctttattatttatttctttctacttgcgtttgatttaatttctctttgattttctagcttcttatagtggaagcacaaattattaatttaaaaactgtcttctctaataaaagaattaaatgctgtaaatttctttctaattgctactttataccccacacattttgataagctatactttaaatttttattctcttaaaaatatcttctaattttcctgtgatttcttcttaatccatcagttattcaaaattacattgaatatctcccaaatatttggaaaatttccaaatatctttctataaaaacttctaggtcaattctattacagtcagaatacatactgtatgatttcagactttcaaatttatcaaaaattgttttgtgactcattctatagcctatctgggagtttttaggccattaatgtaactattgatatagctaaatttaaagctaccatgttgctgtttgtgttcttatttcatttgtactttgtttttttaatgccctttttcttgtatttttgcttgaactgtgtatttcttagtatgaattttacatccattattggcttattagctttagagccttgttttatttttaatcattgttctaggttaccatatgcatctttatcttattatagtcaactatcaagtaatattatactacttccggtataataaaataaacttgttacaaaagtatggttctattccttttcacctgtccatcattattggtgacataagttttatttctacctgtgttatgaatatcacaatacattgtttcatttgaaactatcaattatcttttaaagaatttttttgttttttgagacagttaactcactttgtcacccaggctggagtgtagtggcatgaacacagttcactgcagcctcaacctcccagactcaagcaatcctcccacctcagcctcccaagcagctgggatgacaggcacgcaccgccaagcccagctactcttgcatttttttgtagagatgggacttcatcgtgtgcccaggctggtctcaaactcctgagctcaagcaatcagcctgccctggactcccaaagtgagcgactgggcccagccctaaagaaaagttttaaaataagatatgatgttttttatgtttgtttacattctaccatttgtagtgttctttattcctttaattcaatccatgttttcaactgacttcatttccttctgcttgagaaattttttaaatacttctatgtcagtgaattttatcagctttcatttgaccagaaaatctgtgtttaatcttcattttctagaaagatgtccagaaagatattgaaaagatattgtctttggaaatatattgtactgtgcataaaattataagttgtttgttttctttcagcactttaaagatgttgctccactttctgctagcttaaactgtttctgattagaagtttgatgtttatcgtagttattctatgtatatggttcccttttcccatttattttcaatgtttttatcattattttttagcaagacaattatgatggttctactgtcattttctttgtgattttttatttctatttttggcttggggtttattgaacttcacttatctgtgtatttataatttttatcaagatatgggaatgttccggtcatgatttctttactttcttccttcctcactgcagtagaaattaaacaaaatggagcataaagagagaaaaagactgagaaaaaaaaacagaatttaagtgacaggtggtgaacaaatgctctaatacgtgtgtatttggagtcccagaaggaagagaggcaggtgaaaggaaaacaagccttaagagaatcaatgtaatccacaaacaattgcctattagaacaaagcccaatgctcctaaaaggaaaacaacaaaatctatcaacaatgtaaaatgaacactgtctggcattcagtaaaaaattatgagtcttgcaatggaacattaacctggagataatcaacaacggaaacaatcccagaaacaagaaatgacagagatgctggtcaatgtgctcaaggattaaatgaaaacacaaacaaaatgaggagtagaggaaatcaatctatccaccatgtatctatcaatcaatagacactacagaagaaaatctatatatgttctctaatcctctgcttatgtatagattttcgtccgtggtatctattgattgataggtagatggactgatttcctctatttctctcctgattttgtttatgtttccatttaaaacgtgaacatactgaacatttattatagctgttttaatctgcttgtgtgctaattgcatctctctcaaagtagacattaggctcatttttaagcttttataggaatgaatgtagagtaggctttattaagagctggtttagccacacacttcagggcatccctgaaagccttatacattcagttaagtctctccactctggctgatgggacaaactctgagaacagttttccatagagttccctggcaattgttcttttccacaaattgttcctaaggcagtctcatgaattttcatcctccacttagcaagacccctaagcatatttctggaacaccatttctgcatagctcctcactgtttggtactatgtgttgccaattccagccaactcaggctccccaactcctatctcctcagcttattgagttcaccaagctttgtgtcacatttccatattcataccatctgataatttctccagacagaaagccagggtgaacatagagctcacctcatctattttccatctatcaaggatcacaagtctgtactgcctgtggtccaatgtctgataacattgttttctatatctcattcaatttttctagttggttaatgacaggatagtaagtctgacctcagttaatctttcacagatggagggcacatggtttttgcagcagacatagttgcccagttatagattacatttctcagtcaattttgaccaatgggtatgagcagaaataatatgttcagattcttggtcacatccttagaaaggaagctatttaccttacttcctttctcccctttccactgactggaaaatagcaacctgaagggtcaccttagaaatgaaagccaagtgttgacaatagcaaaggcttcctctcattccaccatccctagacttctcactcctggacttctagcttatgtaagctctgttttgtggagtctccattatagcaacttagtatgtaatctactaatacattgtcctatacagaactcatttactcccttcctccaaattcttcctccattcctgtgggtactgaaagaactgaatcactgtccaagttggtaacctgcatgtcatctttaaagtgtctccctcaccccctcactcctacatccaatcagtcaccacatcctgtgaattccaccttctaaatacttataagaaccacatatagttatttccatatacactctaattatactgaacttatttctattcctcaaaactattattttccccctcttcactttgagctttgcacacttgtactgtcctctcctacttccctgaatcatttttaatcattcttcagacctcaccttcaaaggcactttttaaaagaaagcttttgcaacagccaagttcaaataccttttgttttgtttgttttttgtgtgtttgtttgtttgttttttgagatggagtcttattctgtctcccaggctggagtgcaatggcatgatctcggcttcctgcaacctccacctctcagattcaagcaattctcctgctttagcctcccaagtagctgggattacaggcacccaccatcacgcccggctaatttttgtatttttagtagagaaggggtttcaccatgttggccaggctggtcttgaactctggacctcaggtgatctgccctcttcggcctcccgaagtgctgggattacaggtgtgagccaccgcacccagtctcaaatacctttcttatagcaattagcactagcattgtatttgtgtttacttgcttgaatgcttctctaagaacatgaaccacatcctattcatggatgtggtcctacttctgaatatggtgacttctaaataaatcaacttaattccaatgtattaattctgtctaggtaaataaaaccctcatctggatgagtcctgaaaggccctaggaatcatagtcatcagaggtctctctattactgcttttatactaagaaatttaattttctgttagtttaatagagctgatttgggtgttgggtgaggaaagatatgaggtgagtgaataaaaacaatgaatttgtttgtttctttttaaagacagagttttgctctgttgcctaaactggagtgcagtggcgtgatctcggctcactgcaaactctgcctcctgggttcaagcaattctcatgcctcaaccttctgagtagctgggattatagacatgcaccaccaacggctaatttttgtatttttagtagagacaggatttcaccatattggtcaggctggtctcaaactcctgacctcaaatgatccgcccgcctcagcctcccaaagtgctgggattacaggcatgagccaccataccctgcctgaattggttttaagtaaaagaattttttgaatttcacatttttgcttagatttattatttaaaaagcaggtggatgcaagtataatattaataataagcagaatgacataagccataataagtgtttgaaatgcttgttccctggtgccgtaaagaaacagcacatgaacataaatttaatttatttagtaaggccatttttacttcctgcagaaagggtacactcaccagcagttttgccacaagaatacaccgaacaaaagagacagggtcatttataacctgacacgtccaccctactgctgtgtccggtttccattggctggaacgagacctcacgttctgtattcgttcctattggctagcaacttagaactttttaaaagaggcaaaggtagaggagaacaaaggaaggaggaagtaacttgtggaatgctgagaaaggtaaaaacacttttaaataaggaagaggaacaggctatgacttaatgcttgcttggaccagtataagcctgccggggcaaatatttagaagcacaggtctgaataaattttgctcctaagagaagttactatttattcctaattaaatggggacgaaagtctttgaagaggaacctctacttttattttttacataaggaatcttctatttttatataacaaggtcaaacaaatagtaccgaagtcatgaccttccttattagacctgcaagtagtctgatctgaaacagagctacaacatattgtggtgtttcttaaccaaacaaggttcaaagaattaactggacaaaattcctgcccctggaccttttttccctttctatttctccctatcttctaattctcaatgtctcattaccgaactggtatctccttccagcctttcgaaaggaactacctaaaaatcagagcttgtttgtagttgttatccttctccctgctttttcctttgaatttttgcaataaaatatttttaaccatttatcttcatactttattccacttgtattcatcatccttcagcataccttcattttaattttttccatggaaataaacactcctatccccttgccgcagaaaagagaaaactcacagttattccccaagccaatttaggaagtgggtgatgtaagccctggcatacttacctgccacaccagcccactgtccaaatgccactacccgtactcctctatgatccaccattttctcataatcaataaggcgaatttcctgaaaagaggataaaaaaatttcaactggacccattaagcttaattttaacaagtaaagacatatatgagcaagtaaatatttcacattttttcctctgaaatacaccttaacttgctaacagaagctaccatcaggtataccatgaaatatttagaaaacgccaggtagcaaaccaatggtaggcttgtaattagaaatgaaaaaatgtttgtagcaggtgctataccccccttgatggtaagcaatgaaataataaaggtagaatttcctttacctttctgccccgacccacccagcaccatctataaacatgtctaaagcccctctcatccttacatccttccttctggtcaaataaaacagatccattttgagacgaatctctgtgacctagatcccagcttctctcatgtcctccaagaccactcttcttgaactattacctctttcttgcatcatccatctttacattctttctcaaccattctaagtacactcaggtctcttctacctggaaaataacactctctttcaacctgggaaataacactctctctcaagtccaagcacagatatttttctctctcctcctccttctcctctctttttctttttccctctccttccttttacaggtaaccttcctattaaaagtagtacaggattccttcgagtagctcaagataaaacctggagtgattcctgactcctctccttttctcatattccacctttatgtcatttatcttccttgccttcactaaaaacatattcttcctctttccttgaaaacctttcctctctcaggaaagcattagtaattcatgcttaaaacatattagtgtattgtaattatacactattttaaacagtaattttatttcctcaaagatcatataatttttattatgttcatgaatttaagaatgtttatcattcttccaactccaagtaattggttacaaaatgctgcccaaaagcagccctgttaggtcagttttttttaattttcttataatgaacaaaagttaaaataacaaaaaaagttcctaaagtaatttataattactttatttgcttaaagtggaacattcttcctatagtattatttccattaattacttttgaacttattctttagaaatactacaaattaactgtcaccctggtctactgtatttggaatcaattggaagtattttacactcctatataataggtattttccattgcttttactgtttatgaaccctccaatcctctgccctaatctcggatcctagctctaacatctggaagatgtggaccttagacttctttttctatactcccttcctaggctcatccagtctcgtggctctagacaccacctggtctctcacaactacaaaatgtatgtcaggagaagccgccctcctgagcttcagactcatatccaacagccctcttagattatccctttgaatgtctaatagaatattaaacttggcagaccctaaactcaactcttgatttgcccaccgaagcctttttctcttgtaatggcatcatgtcattccatgacaattgcttcaagtagctcaggccaaaacctggagtcattcctgactgctctccttttttcatattccacctttatgtcatcagtgaatcctgtaggatccacctctaaaacatatccaagatttgtccacatttcacaactttctcttccaccatttcttccaggtgcaggccaccatcacttgtgacttgcagtctagaccagcctaggttagcagccttcttagtaatgttgctctcctcctcccacctccaaccattgttgacacaagagacaaaataagcatttctgaacatggtgtactctaaccccacactcaatctcgaatctgtctgcttaaaagactcatttcagatgtattggctcggtccttcacctcctttagattgttgctcaatgccactttcacaatggggtcctccctgaccatcctacttaaaatagcatcatcacctcccagtgcccaggactccttttctccttcaatattatatttatcttcatcacacatattcccaagtggatattagatgtcttattcattgattatctgtctcctcccactagaatgtaagctttgtgaaaataaagatactttactctttggctctttccttggaacaaacagtgtcagacacagcatcagcactgaatagatatttgttaaatgaatatcttgtgttttaaacagctgctagtttttttcatagtatttctatctcaaaaatgcattttcccttatgaatgtgaataaatgtaaaaattgtctcagccaggcacggtggctcatgcctgtaatcccagcactttggaaggctgaggtgggcggatcacgaggtcaggagattgagacgatcctggctaacacagtgaaaccccatctctactaaaaatacaaaaaattagctgggcgtgttggctggcgcctgtagtcccagctcctcaggaggctgaggcaggagaatcacctgaacctgggaggcggaggttgcagtgagccaagattgtgccactgcactccagcctggatgacagagcaagactccatctcaaaaaaaaatcccatctgaaaaacaaggtagtagattatatgatccctgaggttattttcagttctaaaattctatttgatagtatatggccaattgaccttataaattggtaaattgtttagggtaagagcttttatcattctttccatttcagaatataaaaggaatgcaatgtttctcttaaactaaagaagaaaagaagactaaaactccatttgggggttaaaagtaaaaaatattatttttctacattaatatttataaatattaatcactaattacctgttttagaatctcatccaacaagcccatattggcctcctgagcttttattgtgtgggagaaaaatgcataagtcttcctggacattaatttttcctctggaggtcttttaactcctaaaattagacaagcttcagaaatatcctcctgaagaatgccaccagctttgacatagtcctgaaattgtaattatgattaaaggttattatcctgatttgtaatatccatgttttcttgagcaaaatgtgtagcaaaggcacaacaaatcttttgaaggaataaaatctgtatgaattagaacaaataatagaacaactacttgtaatgtttgtacttgttggctaaagataaatctatcatgtcaactcttacagcattaaacaattagaaaacacagcatatatatatatatgtatgtttaagaagagtttataatttggtcatatgcactagcacatgtgacttaagcatacttgtgaaatgtatattttgtaccaacagtacactgaaatattaaatgccaaattgtgatttattagttgtatttttaaaagataagacataattatacatttatttttcagtgtttacccagttagtatttattactatccttactgtacattagtccgtgctagagatgagatgctaagatacaaggaaagattgtcaagatcccttgtataaaggagctcacaaaatatagtaaaaagtactctggattggagtaaatgaaaaatacaaaacatgatcagcagtatctaagtgatatgctactttaactgatattgagataattcctaagtaggatgatcaaaaaaatatgaaaattaaattaatctgaaaggtaggataccaaagaaatatgagaatttaaattaatctgaaaggctacctgaaatttagagaaatgaagatggcaaacacaagatggtaatatcagtaagaggcattgaaggcatatataaaaatacaaagagagaagtaaagagacatttacaacatacgagtaaaccgatttggaaatgtaggttgaatgtcatcatggctaatacaagacttattgggtaataagtaacaatcattgatatgtattaataaattacatgtactttgctaagctctttgcatgaattatctcatttaaatttcatacaactctcatgaggtaagtacaattataatcctcattcaatcaatgggaaacctgaggcttacaaacttaattgagattgcataactagtacatggaagcaacagacagacatatctgatttttaaataaagaggtataacccaagcagaattaaaagagcaattgaacaaaagataagtttagttaggaatctacctcaaaggaaagtagagatgaataacagagatagttaaaggatgaatatacaatttctccctggtttcttcaaaaacagtccattttctcatttgtagtagattggtaaataaaccatggtaaatctgtacaatggagtacttatcacacagccatgaaatgaaatgaaatctctctaagaacttacatagagcaatgttcaagatatgttgttactaaagaaagaaagcaaggttaaaagagtgtatatagtagacagccttctgtataagaacaaaagggaaataaatatgtaaatacacacacaggtgtttatttttgcaaaaaaaaaaaaaagaaaaaacaatgatagatcagaaacaaaagtaacctctttggggtgggtgagaattggatgtaggggattaaaatgaaaacatgacttcatttctggaatttgtaaatgttctactttgaaaaacaaaattaaatcaaaaatgggaaagcaaacattaaaactgaatagaaacaataatatataaatccagatggatattagattgatgacgaaaccacaccaaaaaaaattcaaataagttttttaatacaacactctgaatattcattgtcagatatattctaaaggcaaaaaaaaaaaatcaaagaaatagtaaacttcatttagtgggcttactattagttgtaataatagtattgtgatcctgacactatttatacatatcataggataaagcaaacaatatgcattaatattaaagaattaagatttttactgttggagaaaacagatgcaaatataaaattttaaaggtaaaaagttgtgcaatgttaaattttaattttcctggacattaatttttcctctggaggtcttttagtatcagtattaactcatgattaaataatatatatatatatgtgtgggcaactgtttgtgtatatttctaaactctgtacactaatagagcctaagagcaacagtatctcagtaacaataaacatgcttaacatcagataccagatcttggtctctatataataaaagaaaacaagtcttcttggtgaaattattaatttcctgatgtggggcaggaaaggtacaaggtgagactaggacaatttgttatcctaagaaacaagaaagctcaaaggtaaatggattcacatccaaaggacagagaagcccccttggaaggactcacactaaccaattttgggataattcagacattaaaaagaataatggtaaatggattgaatgaaaaaggtccatgcttccaaaatatactcaaaaaagcaaaaattaaagaagcataatgcaatagcaaatttgagtccacactttgataaacaattcagttcactgtaataaaacagttcacaactcatcttttaagcaacatcctaagattcatcttgtcaacatgaagatgtatatataaactcctcataacaaggctttaaatgcaatgataagaaagttttttaaagaaattgtttaaacactgaattacagaattcacagtttggtaaacagttcaatgcactgtaatagaacagttcacaactcaaaaaagtggaggagtggaagagaaagaaaagaaaacctcttttctaaagaagaatgtcagcaaacaaacttaggggagtgataaaattagaaaagcatcacttcacaagtctccatgtaaaaactgatccaggcaaagattatcaatggaggctgacatgattagttgtaaagttatttgaggaataggaacatcacagatcttaaaataccataccacagatgactcagtaattacaaagggtgatatagactttaacaatgaagagctctcactgtaaccacctcaaccaagtgaccacacattgccaaccatgggacgaccagatgttttgtgcctttgatgtgatgccatgggaagaacatatatcacttatgttgtattcatgccaaacatttttggcatgaatataacatatagaatataattagaatataatctattcacgagaaaacaaccagattattcgtgcccagtagcaggacactctgtaagtcttggggtctagagtccatgtcaatgtcaatatcattgaaacaaaatcagaaagggatgtgctgttctagattgaaagaactaaagacacacaataataaaatgcaataaagcttcattaagcctcaattaaaataaaaggcatttgaggcaatggggaatctgaacatagactatataagatgatattatgaattattaatttcttaggtatgaaagtcatattgtggttatgtagaaaacatggcttattctgaggagatgcacattggagcatttaatagtaatgagttatgatgtctgtgatctactttaaaatggctcaggaaaggaaaagtatacatatatatgtatattgctaaaataggaatgagtcaaacctataccataatattattttgaagagcaagtggaatgatgaacatgacaggcttctctcagagtggcaggcaaggtacattctcaaaggagcattctctgggtgcaagaatggagtcttatccccctagtcccagaaccagggctgtacatgaaggagagaatgattgaaaaataacatctcctaaaagtaagttcttttattcctcagctggagtaagcatagggtgaaaataatacttttaatcaaagtaaagaaatcaaagtgacactagcaaacattttattttcactcagatgctccttaattttcatatgcaggttcattttattctcacataaaaatattggaaatactcaccttatcatgaatggcccgccgattcgaaggctgtatcaagaccttgtatcccagattggtgatgcctttgatgtgcttgggagctagcggggcccttctctcccaggcgttcacatcctccctccggacggccaacacagctttgtggtgaagacccttggagaggctgacccccagcctgcccagtccagtcctatgtacttgcagcatcttgacacctggtgactgtaaagacaatgtaaagagcagagcaacaaaaggcagcaaggctggcagatcagttctggtctcctgagaaatctgaggtaaaatacaacccgctcttatgaaaacagacacaaggtagagaagagggaagggaaaactgggatgtcaagtgttcctttaaagccaagttttcaaaaacaagattatttaactgcaaaattttaaaaagtatagagcaacgtgtgtgacaccatccaataactgctaagctaaaatagctttttaaatacacattttatcaaacatctattcggcacaaaagttttaaacaaattaatctacaatgcaaatccaggaaaataataaagagcaagactttcagattggtctaaattttgatggcgtaaagtttgaaatccttataatggtatacaagattcttcacaatttagtgccaacctctttccagttcatctctgaccattcccaaaacaagtgtttctcagtgtgccctagtgtcagtcagtgaactgcactgaactgtttttttaaaacaaaaaacaaaaaacaaaaaaactggttcacaattagatgtgtacataaatagaaagtaagcatttagaagccttaatatcacatgatcatatttatttatttatttttagacatgaagtctcactctgtcaatgctaaaatgcagtggtgagatcattgcttactgcagtctgggctcaagtgatcctccagcctcagcctccctagtagctaggactacaggtgcacaaccacccacctggctaagttcttttttttaatttataacaaattactgggattacaggggtgatccaccatgtcaagccacaagatcattttttctagtaatttattgttaccggattttacaaaagtattggtcctcaacagattggaaatttaagaaaaccaatcaacctgtgtaaactagttcaaccattgtggaagacaatgtggcgattcctcaaggatctagaactagaaataccatttgacccagccatctcattactggtatatacccaaaggattagaaatcatgctgctataaagacacatgcacatgtatatttattgtggcactattcacaatagcaaagacttggaaccaacccaaatgtccatcagtgatagactggattaagaaaatgtggcacatatacaccatggaatactatgcagccataaaaaaggatgagttcatgtcctttgtagggacatggatgaagctggaaaccatcattctgagcaaactatcacaaggacagaacaccaaacaccttatgttctcactcacaggtgggaattgaacaatgggaacacttggacacagggtggggaacatcacacactggggcctgtcatggggtgcggggaggggtgagggatagcattaggagatacacctaatgtaaatgacgagttaacgggtgcagcacaccaacatggcacatgtatacatctgtaacaaacctgcacgtcgtgcacatgtaccctagaacttaaagtattaaaaaaaaaaaaagaaaaccaatcgaccaaacaaacctattctttaaccagaggtgttagaagattaagaagcagagttaaatcactctgcttcctagagtccagctcaccttcactgttcacctttgttgctctaaacatgccagttcctcttcctgggttttctctccatacatggccgtctgctgttgtattaaaccccgacctgcctcaaccagttttccaactgctattcaagtgagaagattgtgtaattccactcattcagtcaatcaagaaatagttactaaaggcttactatgatgaatgtaacgggcttctctcaatgtggcaggcaaggtatattctcatgaataaactctactcaaagcagcattctcttggtacaagaagtgtcttgtccccctagtcccagaaccagggctgcatatgaaggagagaatgattgaaagatatcatctactaaaagtagttattttttccctcagctggaggaagcgtagaatacggtggaaataatactttaaaccaaattaaagaaattaaagtgacactagtaaacattttattttcacccagatgctcctaatttttatatacaggttcatttattcctatgcagaataaatcttatgtaaatttttaaagcataaatatccaggcttaacagtattctacccaacttcaattggattctatccaacttcaattttgtagccaaatgtcatttcagatgatgatttgctggatcatttgaatgataaaacttagttttccatgtaaacttggcagcaaaatataaggattcaatgatttttataccttccagaaattttctacccatcaccgctaacaacatatagaaaagcttgcatgaaacacatttattttacatcagactgcaatcttggaagagcaccagcttgatggatggggaaggcttgaccaaacaattaagcatacaagtacatttcctgggggcaaacaactacttgctacctagacagtaaatttataggacactttacaacagaatcagacaacagaccaaacagcgaagagtccagctaagaaggctttaggaagatggccaagaagaaaaaaagctgcacacagcaagagaaactgctgatgattaggagtttaggcttttattcagggcaaaatatgcatgcaaaatagattatcaacatttcagtaaacgactgttatatactgcatctattttttgtttattcatatcttctgttttttaaaatagattgcattaaactcaatcccaaacccataacattcagtcttctcgaagccaaaagaaaaactagaacctgaatccctcagtttctaataaaaccaattccaaagatagtgattcctttgaacatacacaaatgtccagaaaccatcccatcttcccagcaggggctgtgtttcatgaattcacaggtgactacatacccctgtaacttttattatgagttgaaattcttgactccatcaggaggaacatgtggagataatttaatccctcccctctagcccaagcttgaatgttaacctcactcatccctcactcagtaataatccctgctccttctcccaccaccttctttgtctgggatagggcgggaaagcagtagacacacacacagacacaaatacagacagtcacttgtaacatacacacatatacttgcaaaggccaactatcttggaagactagggaaaaagacagaagtgcctgggactgagcttcagtttatttgggaagctactttcactttcactttttgcatggaaggcttaaataataatttctgtaactttcattatttaaacaaatgtaacagtagttaccattgattaagcatcacatgccaagctctatgctgagcactttatggatatcatcttatttcctccttgcaaaaatcttattaagtagatacatatccccattttatagatgaagaaactgaactggaatcatataggatctgttgcttttaagcagaagcaggattcctagtttaatgtttaacacctggaattttctcttctttgccaaagcctacagattcacaccatatagatccaacacatgctgttaactccagccaactcttgtttcagaaagaaatcagatccatatggctttgccttcaacagtcacagtgaattaacagttctccccgtagcatgccgtgcctctcttgaccccttttcctgctttatactgaaaatcattcctgagtacctgccaagataaattctagatttctgggtgcttagaaaaaaaatggtttgattatagtataactgctagttactgcttgaaccttaaaacttggtctcagcatagaactttcaagatccacagttcatttgcttctaaggtcttcaagaaataggaaatagtgagaatttctgaattgcactgcaggtgtctagtatttcatggaaatgccaacggaggctgctttagctttttctgtcctggattttgtggtatttttcaagaatatcaggaagtaaattcaatgtatatttctggaatgccttcaatgaaggaaggagggaagatcagggtttactcaccaccagctctagtgaggttacccgacaatgtcgggtgctgataacagcttgtaacacaagcaaggaggatgtagaaaagcaggaggcagagagggggaaaaaaagagctagaaagaacaaagaggaggaaaatagagaaagagaagtgtcacacaggcaagggtggggtacaagacccttcctctgatgaattgtaacagtcttccctttgttacatgaaggttaacatttcaaatataaaaatgaaacttaaaagatttcttctctgtttttgtaaaacagaacaccactaaggtatacatttttatttacctaaaattgatgaggaatttgaaatgtctctaaaagtcatgggagtattatagtgaattgcagcgagatacagtagaccctgtttatctgtgggtaatacattccaagaagcccagtggatgcttgaaatctctgatagtcccaaaccctatatatactatgttttttcctatacatacatacctatgatatagtttaatttataaattgggcactgtaagagactagcaacaataataaaatagaataattatgacaatatactgtaataaaagttatgtaaatgtggtctctctcactctctctttctctctcacaatatcttagtgtactttattcacctattttcagaccagattgacagtgggtaactgaaaccatggaaagcgaaaacttggataagaaggaactactatgtactgagacaggaagataatagtgaaggttgcccagtagcaataggagaacatactctatgatactgtcttatctttccatctctcaaggtggcaagacttaatcttttaatttgctaactttgcaacaaaaacatgagaatcagaagaaagaacatgcttgaatgttctttgtatttttttattattttccagaaaagggaaaggaaaatgacagagacagatagagagagagagaaaaaaaaggacacagagacagagctcggcactccatacacatcccattttctttcaatgaccatgagctgtcctatggtcactgagtacaccatcattctaaatcacatggagtaaccaaagcaaagcagattctgtaaaatgtatttataaaatattatatttaagaaaagccactctcaggacagagaatctcatgtgtggttagaaaggtcctttcagagtgtgagcaaagtggtcttttgtacaattacacatattaatataaaaacagctagtcatttgcttatagcacaaatattttctaatatttaaattataatgaaatccagaaagtctcttgatagagttatcaaaataaaatcttttgtacacggaatatgggacaaatgcttttgattctctttaattaaaaaaatatttgggggctacttaagatatgcacggcatgatgcacttggtaaagatataaagaagcagtaatccaatccctgcccatgttcaggattagttttatcaaattaaatggtgctgatcaatatctgatagtgaattattaattattgattatatccaaatattagagtcaaagtgggactgatagaatgtaatctaaaatctagtattacaaatgagaatagtgaggcccatagaaataggggatttttttctgttttatagaaagcattttccaagccactattatgtatttttatgacttatcataatggatgtcacagtaagtctgttctcgttggtataactttttaaatgtaactcgatcaagatttttctctctgctacttttcaggcaatatttatgccttaaaatgatgtgtttggccaagcacagtggcttatgcctataatgccagcactttgggaggccagggtgggcagatcacctgaggagttcgagaccagcctaggcaacatgcaaaaccccatctctactaaaaatacaaaaattaactgggcgtggtggcgcatgctggtagtcccagctactcgggaggctgaagcatgaaaatcacttgagcccaggaggcgaagtttgcagtaagtgaagatcatgccattacactcccacctggacaacaaagtgagactgtctcaaacaaacaaacaaacaaacaaacaaacaaatgatgtatttaatttttgcagtttttataagggaacggggtagatgaagagagctgagattttcatagagctttttactcttccatcaaatagctaaaattctttaagtctcttcaaccctttccatagcaccaacccaatcagaatactttttaagcttatagatcacctacctaagcaaaacaatgcacaagcattacaagagcttaagaatgaactaagcggctgggtgcggtggctcacacctgtaatcccagcactttgggaggctgaggcaggcggatcacgaggtcaggaggtcgagaccgtcctggctgacacggtgaaaccccgtctctactaaaaatacaaaaaattagccagggtcggtggcgggcgcctgtagtcccagctactcgggagactgaggctggagaatggcgtggaacccgggaggcggagcttgcagtgagccgagttcgtaccactgcactccagcctgggcgacagagcgagactcagtctcaaaaaaaaaaaaaaaaaaaaaaagaatgaactaagcattgcacctcttaatttctgttacttcttttgggatatgtatgaaggatcacacattcatttttgaagaaattaaggccaaatgttccaactttaatccccacagttaggaacgtgctctttgtccatctattttagatatttaaaataatttcactacagcataattcaatgactcaaaccaaaactatcaaatcacacgggggatttctgaatgacaaattatttgcaataatcaggcatatattgtgattaaatattgagagactaagaatgaggtaatgtagtctttagatgaagaaaataagttcaaggatgaacagcgctaattatttatattcacccttccaagtaactaaaaaaaaaaaaaaaatacaagtatatattaaaatccatggtttcccaagaagcactggtgtctgtaaataagtatggcagctctatggctatgagtcttggcctacactaagtatccaaaccataatattttttggagaggttcaaaagagttccagaattaacacagcaccagatgatggcctagaactaatccaaatccctcccaatttcaaggcttgctagaactaggcttgggcttgcattaacactggtcatactttgacttcctgtgcgtgggtacattcttttaatgcttccatgttaaaccctctataaaatactttactggattaagaagaaagtggtagactttgggggaggaggtctattagtgttaactaatctggtctgagaattttcatattttctccagcccatcacctactcaaagtcatccataaacatgacacatatttctcctggtctctagcttataattttagcttcattgaaatggaatacaaagttagttctaaatcggagtctagtccaaaatgcttatctgcttacttgtctgtctctttgctaaactgcaaatgtgtatgagttgtgttttactcatctctgtattcccaatgactggcacatgggaaaacagcaagtgttttaagaaagaatgaataaatgaaaaagcaaattcaataaacattataaagacctatgcagcaagaaaacaaacaaacaaacaaacagataaaatagacacattaataagagactcacatccccctaaccctgcaaaaaaaaaaaaaaaaaaaaaaaaaaacttgattctcttccaagatctcatagatcaacaaatgtcgtgaaatatagtacagtatagtgggaaaacttagacatgggagctgggacacataactagatgtagggttcctcctcttgacttcagtttccttacccagacaaaaatataatactaaagtccctttcaggctctgatattctgattctattaagcatagtagtaactggacactgagaattacaaaaacattagaaatgtagaacataaataggcactctgacttatgaatttctagctaaagtacaccaaacagggaaacaaaataccaaaaacacaatcaagaaagagtggacattcacctaagctacctgcattaatagcatggaccaggaaccaagagcttgcaacagaagatggatacctcaaaggaatactggtttctctcctgggttcctcagcggccaaacttactctgtgaccttggctggcaacttaacctgtctgtgcatcatgcgcaaaatgagaatcatattaacctctacctcttagggctcttaagacgtttaattgagctaatatgcataaagtgctgagcattgctgtgtgtcataaacaataaattttaagaaaagaaaaagcctccaggcttgcctactcctcaaaagcgagcacaaccacgccgctaacagtagactcacatttctttcctctgtcacactgtagtaagaccttcacgatggctccatattaatcccccacccttacattattttggaaaaaaaataattagagcccaataagccctctcttcaacttcaaacttcaggcatgcatgttcaagataaataaattaccattttaatgttgtatttcatcaaatttaagacaatttttttacacattttagcatcagtgaaatagggatgcatcttacaatagatgacaccttagatcagatgaatgtggtaataatgttttggggttattttccattccaaatgtttgtttccatgatttcatgaattgcatagaatcttttgtagccttcccaagaaaacttaccactgtttgtaatgttatttctatgagaaaattaataaaagaatatatgaaaaaaatgaaaatgttttgttaaatggtggcttcttaaacaccaaagatcatttccaaaattccgaaccaaggtctgttaaacgactagtgagaaaaaaaattcaatgacaaataaaccaaagttctgatcacgccatcatcaataacaagtgaaactgataacaaatatgattatctgaagagtgggaaaatgattcaggtaaattggcttcaatttttgtccacctaactcattttgcagaatggccaccaggttacacagtcaagtcatgtagccctagattcactcatcttcatgggaaaaaaagaagaggggagtgcaggggacaaaacagacaaacccagaaacaccaaagtgccatcagtgttttgggattttttttaatacagtattggaaagccgcagcttcagtcaaggaccattccgtcctgtgtataactacatctcacagctgcaccttccccactgataacccacaacatcaaaaaatgttaatccttgttcaagttactgaactaattcattctctctcgcgctcgagcgctctttctctctctctcttccgctccccccacccccattcccctgaaatcaatgtctgaaaagcacatttcttcttctgaagctgtcaggatagacagacattcagccccattcaaccgaggagggtgggtaaactgcttctccccgcgccccgtcccgcgcgagcgctcacaatgggctgcatagtcccgcaggggctgaagagttcaggaaacccagacttgcaaggcgcccaacttccacccatctccgatccttgctggagaatgggtctgtgtctcggagagtgggcagcccaagatggacaaggagagaagtttgtgatcagtttggctaagctgggcgtggggagggaagggggaaagaaccaccccgaaatctccatccaccgccccctcagccagccgtcccctctaagcacgccgtccacaaattaacaagccgttgtttcctcagcttcatcagttctttattccccagccacagcaccaccactgtccgccaaaaaagaaagaaaagaaatccgaattgcaatccctcgcctttctacttagaaatgctggagctgcgctgaccgctctccctcccttcctcgcagtgaaactctctgcgtttccgctctccctccattcctcgcagggaggcccgaatgctcgccgccttctccctctctcggcccggccggggtcgcctcgcggcgccgggacccgaaggccaggctcgcgggcccctcccagcgacagcccgagcccggcccgctatctccaccgcatctcacaggctgagcccacccgcgcgtctgctcagctctccgcggggacctctcctctcctcacctcgtccgctctggggcgccgacttgtcccccgccgcctcgaatcttccgagtcgctgcaggggaggctccgaattcctagaagaaactgggatggaaggccgggaagtaggaggtgtttgctcaacttctgaggacgtcacgcctctgcctcccgtagccaatcagcagccgccctgagggaacaaccttctcatctgccaatcggcggcgctgccagttgctacgtcatgcccggcccctgctcctccccaagatccttctgtctctgatctctgatctctgacctgcgttcttagctgggacgtcgagttctcccaggataattatcgaccaggtttgtaactgtccgtggcagaaggcgggcggggacggaaagcaacgaaaatagtctgggcattacgctctaaatagaggtgcacatctcctggggaaaagttgcgagcgccggtacctcacgtttgtttagctatagacacttttcaaagcatttcaccgccttgtcacaaccctgtgaagccagataacagttcttacaacagttttagaagccagcaagcggagaatctgagaaattaaaactgagtgtgttcatgtgcatatggcaatgtccaatgttattgaaaagtcctaactacctaggaggcctggagggagggggaaaacgtatttcatagacactagccccagcactaggaactgaagaatcgtctgaagcccagctgtgattccccaaggcgtcaacggtcagaagttaatcttccctcctgtttttacaactttctccaccacttactcttcttatacctgccatagatgtatttagctactgaactcctatgtcaacaatctatagccagaacgttcttgagactccactcatatctccaattgcagagaaaattatttatttatttatttgtggtagacatggggtctcgctgtgttgaccaggacactggtctggaactcctagcctcaagctatcctcccacctcgtcctcccaaagcactgggattacaggtgttagccactgtgcccaaccccaaattagaattttatctgtaagtagagttggaattttcttctgtatcttcagcttcacatttccaaaatcggatcccttatcattcttggaaagtcttccaaaggctgtgtagtggttcacacctgtaatctcagcactttgggagactgaggctggagaatcacttgagcccaggagtttaagactaacctgggcaacgtagcaagacctgtgtctactaaaaataaaaataataaaaataaataaaattttaaaaagccaggtgtagtggcacatacctgtggtcccaactacttaggaggctaaggtggaaggatcacttgagccgcaggatgttgaggctgcagtgagccatgatcatgccactgcactgtagtctgggtgacagagtaagaccctgtctcaaaaaataaaataaaataaagccttcccttttgtgctcaccagctctgttactaatatcactgccttcctactcaccacctatccagacttaaaaagccacggtcacttcagttcttcctctggcccctcagccttacccttggtgttgacactgtcctttaaaaaccccactactatcaccctacttcaaacccctttttatatataacgtagaccatatttttttaagcatacaactccaattgtctcattggcctaagcaaaaagcctcagagactacccagtacttgtggaacattagcccaacgttcttcacataatgttagttgcttcagatgtggccaaaatcaatgaccttggctttatttctgcagcagaaccagcctgaaaccaccactgaaacacaatttatgccttgctatcttcctaaggattaagcatctgggtaagaatgtaagaatccttactcttctcctttgagttgtaaatcatgggcaagttacttagttttcaaaaaaagcctgtgctccattatctgttaatgggttaataatagccactacttcgtggagtcatgagaacaaaatgagataatggccaaagtgccctgttaattgtctcactgaagaaactggaaatcattatttattttcctccaaatacctcatgttgtagacttatctgtaattctaatttacaaaaatattcacctttctaaaactaaccagccctttggggttcagctcaaatgccacttaaataatgaaaactttcctgaatatttcaaccacatgtgattgtttcccttctcccttgtgtattggcctctcttattgtacttatcacattcttccttttatcacagttattcatacttaccttatccacattgctcagctcacctgtcatcaccaccataaaataagaatatgtacgtggacttcctcttttcttttcttttctatttatttattgcttctagtacgatgctatgcgtgtaataagtcagttggggtcttagcaggaaataggtggcacaatccaactgggtaaattaggagacacaaaaggactgagtgtatgcagggataaaggaaagtggcagtatatgtgccatgtagtccctgggactagcaacactgacaatcactcgtaggcctaaacagggccagggaaagaaataattaccagaactcaggaatagttctacctgtagtgtagctgtagctgtagctgtagagagtgccattcaaccaacagtagtggtttgtgacaggaataaagctgcctaaagattaatcctgccggccgggcacagtggctcatgcctgtaatcccagcactttggaatgccaaggtgggcagatcacctgaggtcaggagtttgagaccagcctggccaacatggtgaaaccctgtctctactaaaaatacaaaaattagccaggcatggtggcaagggcccgtaatcccagctacttgggaggctgaggcaggagaatcgcttgcacccgggaggaggaggttgcagtaagccgagatgacaccactgcattccagcctgggtgacaagagtgagactccatctcaaaaacaaacaaaaaaagattaatcctacctgaagaggaacctacctaaggcaggggtcaacaaacttttttctgtaaagggccagaaaataaatattttaggcttcacagatcataccatctctgtcatgtcatgactactcaactctgctggctggaatgtaaaaggcagctataggccatatttaaatggatatgtgtggctgtgttttgataaaacttaatttacaaaagtaggctgcagggcagatagggcctctgggctacagtttgcagacccctgttcttccatagggaaggaataatcttacttcactctcctcctgccccttcatctcctgctgatggcttctactatttggacataaatagagccagattgttagtgaagtccaaaaagatcacctcccattctgggggcagagcaggtgcagaaagggacagaaattctagagggttcaaaggagaatattcaacacaaaatgttttcagcaactacttgttgaaatgaatgaatcgtatgactggtcactgtgaatcccactgcaaatgattgaacgctcatggaaaaactgctgaaatttaattcctaagtaggaaaagctgggaaagggccctggaccatcatgacttcaacaaggacctgaggctcagtgtgcttctctcttgctttactttaggaattttgcaaaatatacacatgagaaatactggttcttgaaatgaggaatttcaaacatttttcagtgtagtgacatttgttgtaatgagtgtgacagatctcagaaatttctttataatgaaaagggataacagatgagagacaaaaacaaaccttggatacccctcaggtcagctcctgcagtcaatccctcaaatgtttttaataagggagacctcttccatccacattgggtgctgagtccgtgctcctgaaattgggaagttgattctagccactcaggctgcctctctttctcccacctactttggttttctctcttccccagtcattctctattttcgtctggttcttcctgtgaggtcctgaaaggtagtggtttggcacttgagcaccagagtgaatgggacttagatttaatcccttctttgcctctcactagcaagtcactaagtctcgctttctcccatcaggacagtggagaacatcatagggttgtcaagattaaatgagccatgttcttaatatatgtgagctaatgttaaagcttactagtttgtcctgttttatcaccccctcacctttcattgcatttggaacccagtctcacttttaaataagtttttctataaagataaaacaagtaggtatttgagaggagaaggaggaagaaatccagcatgctcctaaatgtgttccatttatttctcaaaattttatacatttaagtcctcacttaacatcatcaacacgttcttggaaactgtgactttaagcaaaacaacatgcagcaggtcattgaatagcataattttattcaatatagttttgttataacattgataagaaaaaatggttttgttacatacatatatatatatatgtcattttgcttaaagtcatagtttccaagaacctatggatgacatcaagtcaagactaattgtatttcttaaatgaacagcaatttttaccatatcatctatgatatgcccaccctaataaattattctacttattgtaaatagaactgccttataggcagaaactgcaaattcaaaataagaagtaatttagaaaagaaaagtttttaaatgacaattactattgttgcctaactctcatattgtcttgtaaatgacacacacattttttacttgcaaagaatttaaaaatcaattcaggtaaaacaagagcaggaaccacccacaggtaaatctaaatctcacttcctgcaaccaggaccgttctcccccacgaccaccacccttagatgaaagaaggaaagaaaatgaattcctagtttacctcctctgccattagtcattagtcatatttagggaatccttcttgaaaaaatttcaagaaaattccaagcctcttggcattttagggccaacttttattggcttctaatgttttaaaaaaacttcccaagagtctgtggcttcttttgaaagttacacgtgcggtacacctcactcagcagatttgctgctcgtaactgcccgcttagtaactgttaccaaaagtctatcaggacttttgaattttcagttacacttcactgtaatgaatgcatgacagttatattttataataatataagcaaatttggagaatgcaaatttcaggatatatctcactgacataatggatctaatgtatgcaaatccaggaagaaaatccagtgttcccttccccatcttcttttgagcaaaagtctcaaaagaaaagatgttttaaagaactaagaaaagattggggaagaagatgggaaaaaattaaagcacaaataaaacacacaagtaatctttctgggggttgagctggagagagctaacagaccaggtttaggagtgtcgacctaaaggaaaaaactgaggcaaacttaatataagtgaagagtttatttggttgaagtttgaggactagaaccagagagcatatattcaacttgccccgaatatacactcccattagcagtgtacctgctgtaaagtacaagtaaatttttaaaggaaaggaaaaggcagttcctaagttatttaccaataatttacattattgctattgattggccttacattgttctttgtatcacaaatcccaggaacatggagataatggataaggcagctagttaggaaaaaaattgctttaaataattgtcctcctccaccaccaccactatgggtaagtcctatactcatgactctctgggcctgacaaattttgcacaactcacattcctcagactgctctgaactattttccttttctcaggaaataaaagaggagtcaggatttttccttccagtctcagtctggatcaactgaatgaaagcaacctttcacagtagtcatttcactattgagatgagaaggaaataaaaagaatatatatatatgtatatatggcatgttctcacttataagtggaagctaaatgatgagaacacatgaacagatgggggaatacacacacacacacacacacacacacacacacacacacacacacacacatatatagccatgtaagaagtagcagctaagaaaaataatcaaagtataggcaaggccacagcaaaaaaatgtaaagtaaaatggagaaagtatccccaacattcaactgactctcatgataattgccatctgtgtagttcctcagaaacagacataatagaatttaaaagggacagaaaaagaaaagcagaggaggatgctctcattggatggtaaactgttgatactgcccatgatagaaacagacatttttgtcttatttactattattgaacaaccccaagattctaaaacaaaacaacagtaagccacacacacacacacacacacaaaaggcaagaatttaataaacagagtgttgtctgcacctatatacacaggttaattccaaaatgtttgttaattgttctgtaaacatggttaagaaaaatactccttctatcctaagaaactgaatgcctaatataccaaagatgtgtcaagacaagcaccgcactaatcactaatgtttttacttctttttttttttttttgagatggagtttcactttgttgcccagactggaaagcaatggcatgatctcggctcactgcaacctctgcctcccaggttcaaatgattcgccttcctcagcctcccgagtagctaggattacaggtgcccgtcaccacgtccagctaggtttttgtatttttagcagagacaggggtttcatcatgttggccaggctggtctcaaactcttgacctcaggtgatccacctgcctcagcctcccaaagtgctgggattacaggcctgagccaccgctcccagccctaatgtttttacttctaaaagtcagagacttgagttctgtgtctttgaaatccaccaggatcaactagctgccctacacacagtgggggtctgagggatctgtgcagttatgtgaagaagtagatttggacctggagaaaacagagaaatgaaaaaggaacaaaatgagggaaggtggataaaaataaagtgagtggaggatgaggggctgacaataggaggattgagccaaagtttacttactgcatagggaaccttaaaccccttcctctctttgcttccagaatgcctgcagctaggcctttgccctccagacagaaaattaaaaaaaacaaacaaacattttctctgtaaaactttcccagccaactttcagatgtggaatttgaaaagaaagaggagtcaatagtaacactaagattttaggcctcaacaatttagaagcaataagttgcctttaactaaaatggggaagacacttgaagggcagggtaggagaaagatcaggagtttggttgcgaacaactcaggtttgagattttcattatgttaaccagtaaataatatccaagttaccagtggctaatccttatgggtctgcagcaatctcagttcttgccttctcagaagaaataattcagctgaggggcataaggaagaaaaagagactgaagcaagtttcagagcaagagtagaagtttattttaaaaggctttagaaccacatttccaggaaaaatatagtttcctggaagtctaatgaagaaataaaatttgatttgcatttctctaatgatcagtgatgttgagctgtttttcatatgcttgttggctacacatatgtattcttttgaaaagtggctgcccatgacctttgtccatttttttttttaacttttaagttcaggggtacaactgcaggtttgttacatgggtaaattgtgtaatggaggtttgttgtaatattatttcatcacataagtattaatctagtacccattagttattttccctgatcctctttttcctcccaccctcgaccctccaaaagaccacagtgtgtcttgttccccctatctgttcatgtgttctcatcatttagcttccacttataagtgagaacatgccgtatttggtattctgatcctgtgttagtttgctaaggataatggcctccagctccatccatgtctctgcaaaggacatgatctcattgattttatgtctgcatagtataccatggtgtatatgtaccatatgttctttatccagtctgttattgatgccttgcccagttttaaatgggttgttgttgttttttttcttgtaaatttgtttaagttccttacagatactggatattagaactttgtcagatgcatcgtttgcaaaaatttcctcacgttctgtagttgtctgtttacactgttgatagtttcttttgctgtgcagaatctctttagtttaattaaatcccatttgttaatttttgcttttgttgcaattgcttttgatgtctccatcataaaatctttgccagttcctatgtctgttgtcttccagagtttttctagtttttggttttacatttaagtctttaatccatcttgagttgatttttgtgtatggtataaggaaggggtctagtttcaatattctacattggtctagccaattatcccagcaccatttattaactaggaaatcctttccccatggctttttgtcagctttgtcaaagatcagatggttgtaggtgtgtggccttatttctgggctctctattctgttttattggtctgagtctgtttttgtaccagtaccatgttgttttggttactgtagccctgtagtatagtttgaagtcaggtagtgttatgcctccagttttgttctttttcttaggattgccttggctatttgggctcttgtttggttacatatgaattttaaaatcgtttttcctagttctgtcaaaaatgtcattggcagttgggtaggaatagcattgaatctataaattgctttgggtagtgtattagtccattctcacactgctataaataactgcctgagactgggtgatttacaaaggaaagagatgtaattgactcacagttctgcatggctggggaggtgataggaaacttacaatcatggcgcaaggagaagcaggcatgtcctacatggcagcaggtgagagaaggggaaaatgccgcttatacaatcatcagatctcatgagaattcactcactctcatgagaacagcatgggggaaattgcccccatggtccaatcacctcccaccggttttctctcttgacatgtgaggattatggggattacgataggagatgagatctgggcagggacacagagccaaacaatatcaagcagtatgaccattttaacaatattgattcttcctatccaagagcataaaatgtttttccatttgttcctgtcatctctgatttctttgagcagaattttgtaattctgattgtagaaatctttcaccttcatggttagctgtattcctaggtattttaatttttttgcatggcaattgtgaatgggattgcattcctgatttggttctcagcttgactgtgagtggagtgtaggaatgctagtaatttttgtatgtttattttgtaccctgaaacttcactgaagttgtttatcagcttaaggagattttgggccaagactattgggttttctagatgtagaatcatgttatctgcaaacagggatgttttgactttctttcttcctatttggatgccctttatctctctctcttgccacattgctctggccaggactctcaatactatgttgaataggagtagtgagagagggcatcagtcttgtgctggttttcaaggggaatgcttccagcttttgcccattcagtgtgattggttcaggtttgtcatagatggctcttattgctttgaggtgtggagttgagtagttccaatcaacagtcatggaaataaaacttaaataagttttaaaaagagatataaagagaattacatagtaaatagagacatcccttccatggagtattatagtaaagggggataaacatagtggttactgcaggaagaaaagtgagatcaggaaaagttattcttaatgatgattaatattatagcatgtctgtatgctgatgggaatgattcaagagagtggaaaattaatggtatgcgacctcatacacaagcggagggttggtcttaagtagaagcaaggaagaaggtaaagaatatgagctcagatgtaacagagttgatacatctagtgatgggaacttgtggaaatgctcttctatttaacaatcattttaaatttcacaaagtcatcagcagagccttcagctgacagtcaggtgcaaagaaagtattggaggtttgaggaaacaagaaaatacaaagtcatcctttaggacaggtgtcagcaagctttttctgcagaagactagctaacaaacattttgggctttctaagccatacagtctctgtctcaactacacactctgtagttgtagtattaaagcatctatagataatatgtaaatgaatgggtgtggctaagtttcagtaaaacattgtttatgaaaacaggcagcaacaattgaatagcacaagcaaagaatgaacttgggcccctactccacactgtacataaaaattaattcaaaatcaactttagacctaaaaatgggaaagatgaggggattgagagataacagctcaagggcatgggatttctcttttttttttttttggtgatgaaaatgttctaaaattggttttggtaaagtttacacaagtctgtgaatatactagaagccattgaattgtacactttaaataggtaaattctatggtatatgagttatgtctcaattcaactacctaaaaaattaaaacaagcaaaactggtgatgagtcagatttaactctctggtaggagctagcacttgggctctccagcctgagtgtgcatcagaatcaccaggagggcttgtgatatggtttggttctgtgtccccatccaaatctcacgttgaattgtaattctcaatgttcaagggaggtgagtggatcatgggggtggtttctaatggtttagcaccatccccctagtgccctctcatgattgaattcgcatgagatctggttgtttaaaagtgtgtagcacctgcatcttcgctctttcttcctcctgctcccaccatgtaagatatgctggcttccccttcaccttctgccatgattgtaagtttcctgaggcctgccaagccatgcctcctgtacaacctgcagaactgtgagtcagttaaacctcttttcttcataaattgtgcagtctcaggtagttctttatagcaatgtgaaaagggactaatatagcttgttacagcaaagatgtgtaggcctcacacccagagtccctgatttaataggtctgggctgaggcaaaaagtttgcatttctaacattcttcccaagtaaagccgatgctacaagtcatggggcaggccatggccatgaatcactgatctaggagtataggggaatgaatgaattagcacaatataacaaaattcctagaaagctttatggggcccattggaggtattggtaaaataaaaaaaaattaaggtgagaccaatcataacagtgtgatttccttcagccacgttcagcttctcagatgttggcacagagtagatgaagataaatattaagcagaacaagggtgtgtagagtacatgcaaaagaaagatattaatgactgactatgcaatttaagccagacacagaaggaaatatggacctgagagagataagagatggagacaaccggtagaatgaatggctttttttctggtggagtggggccaaaggattgttggagctgaagtactggaggaaaaaaaactgaaaaaagactgttgggttggaaagtgggatctttataaggaagataatggaggagctgctgttattggcaatgacaaaattcagagagtgagtaactgagatagagaggagaaaacgtcaaggaaatgacaggccaggttgtgaaaaggattatctgcatcggtgctgaaataaccaataattgtaataagaatattattgcatggaattacagtgaaccaggaactagaatctttaatagactaagggcaatgacttgggttgaggtagagcctaccccccaaaagaaacagtaaatattaagatgtaatgatgtgtgatgaaaagctgtgtgtttttagggatagagtaatatggggttggaagcttcagagaacagcaagtaacatgccactactccactcccagtggtataatggatgtagctgagaaaacatccactgcttaagagggttgcaggggtaggagtgttaccagaagccaggtttaatgagagcaagaggtgaagacaccattcagaaaagatcttgaagaaaggagtattttactgataattgatgaattccagaggacacagggaaagggttttaggacgtaggcagaggcaggagatggaacaaaaaaggttatttgcaaaaccatatgtgcgttagagtacagaaacaaagacctgaaattcctgggcttcaccttgtgactgtcaagagcagggatatagacaggatttgtcagcctcgtcactattgatattttgggcctgaacagtcttcgttgggattgtgggcggagttggggggtggatgttctgtgcactgcagaatgttaagcagcatccctaggttctacctactagatcacaactcaggtgtgacaaacaggaatgactgtagacattcccaggaactcactgtaagaaaataattacgtgtgtaataatatatttattttcaatatatatgatctgtaccttgtgtgtgtatacatacacgtttgtctgccagagtatgatatgcagtagccccaaattcaaaacatataaatgaccctcaataggatattggctaagtaaattatgatacattcatataatgtatcatctgctgcaatttataatcatgaaaagaggaaggtgggttcaggacagcggccattagggtctggtgtaggcaaacatgccaggacagaagtctgaggtccaatgtgagagaagcaaggagaatgagcttcaatagacaacagaaaacaaagcgtttcaaaaagggaaagaagtcaaaggttttgaaaaaaaattaaaacaaacagacaaaaaaaaaaccccaccaaaatcttagcattcctctgtttaattttcagttcagaaaatctttcacagctaaaaacaacatctgctgcttctgcttctcttgcacacaggctgcccttgcctccttaagtccccaatgtcttggctgctttggcatctctgccacttgtagaagcctgtctgtactacctgctgagcccacaccagctcgcctgacaggaaggcaaccctgtacctagcaactcatgaagtttaatggccttgtaacaggttcatagagaaccccaccctcccatgcccgcaaaattcatgcccacccagagccttagaatgtgaccttatttggaaataagatttttgcccatataagaatcaagatgagattatagagatgagtatagtgattcatgcttgtaatcctagctctttaggaggccaaggcaggaggattgcttggggccaggagctcaacaccagcctgagcaacataacaagaacttgtctctaccaaaaaataaaaaattagctggatgaatccctgtagttcaagctactcaggaggctgaggcaagaggattacttaagtccaggagttcaaggtttgtggtgagctatgatctttccactgcactccagcctcagtaacatagcaagaccttttcttttttgtttttgtttttgttttttgtttttctttgttgttgttgtttgttttttaagtgagattatactggatttgggtgggctctaaatctattgaacgtgtcttattaaagacagaaagggacataaagcctgaaatttctacagacccatttaacaaaagtatctcacaataaatatgtgaaaataaagtagtgggaataaacttgtttttgattacctgattcctgataagtctgtaactcatggttcttcattagataggctgacaaaaagcttatcaaaaagttggtaaacactgtcttgaaaacatatcttgaagcataattgtcattattatgcagggtatactgggcccagaaacctccaaagtgtaaggaaaatcaaaagatatcactctcgaatgaaacagatgaacagtaacaaaatagagggaagaatgaccaactttacaaattatttttaaatgaatcactgaaggtactaagaaatttcccaggtctctatcgggagaccctattgtcttctcaagaagatttttattttattttattttattttttgagacagggtctctctctgtcacccagattggagtgcagtagtgtgatcattgcccactgcaatctcgatctcctgggctcagcctcttgcttcagcctcccaggtagttgagactccaggcacgtgccaacacacctggctaattttttaattttttgtagagtcgaggtcttggtatgttgctcaggctggtcttgaactcctggcctcaagtgatgctcctgctcagtctcccaaaatgctgggattacaggcatcagccacggcatcgagactgtgcccatattttctgaattccactttctgccttcttagctgcatctgctccaccacttaaactgcatcccaatgccaatggttgccttcatctggtccctcccaatttctcctcctttccataatgtatcagtcaatggaatagcaggaaataaaaggcaaacacaaaggctgtaactgagtgagcttaataaaaatattatctaaagagttatggacaaggttaaggaaacaaaaacatgtgatgtaacacttagggaccagcaataagcgggaaatcattgtcaccccaaaactatttatggagatacccagtgtagattggagagagctgtttttccaaactattgagcatggtgacttagtgattggaaaaactagttttatacaggaattttaatttttcatggtgttgatttgttgatgaagtggcatcataggagatacattccacttagaaatcacaggtctttgtccattaagaaatgtgtcttctcacagtaaccataggggttatttatcttactatcaaactggtgacatcattcaagctggaatcaaggatattgatagatgccatgcaaagcttgcactgtctctggatacctcgtctcttccaccacacctatctggtattaaattaggtgtaattagccctgaagaacttcctttgtgctacaggaggtgtgttgaactaaataacaattctttggagcctataaaaatatcatgcagagttcagtgggatttgttaattgaggagtaattttttttctagaaaaagtaggaatagactaatataatccaccaccttaaaaaaacatatttagggccaggcatggtggctcatgcctgtaatcacagcactttgggaggccaaggtgggcggatcaagaggtcaggagttcaagaccagcctgaccaacatggtgaaaccatgtctctactaaaaatacaaaaattagccaggcgtggtggtgcatgcctgtaatcccagctacttgggaggctgaggcaggagaatcacttgaatctgagaggcggaggttgcagtgagcccagagtgtgccactgcactccagcctgggtgacagagcaagactccatctaaaaaaaaacaaacaaacaaaaaccaaaaaaaaaaacaccaccaccaaaaacacattgagggggtacaagtgcagttttgttgcatagatatatttcacactggtgaagtctgggcttttagtgtacccatcacacaaataatgaacattgtacccaacaggtaatttttttctctctcttttttttttcctcaccctccttctaccatcccaccctcctgagttcctaatgtctgttattctactctatatgtacatgtgtacacattgtttagctcctacttagaaggaagaacatgcggtatttgactttctgtttctgagttatttcacttagggtaatgtactccagttccattcgtgttgctgcaaccatccaccatctttaataaaaggcctgcagagcaataatttctcttaagacaattttgtttctgcattaagaaagtaacaatatgcaccttgggctttaaaatgtgtgaagattacagtttaagattggatgccatgcggatgctgtgaatgaatacaataaagctctagaaacaaacaaataaaacgctggcagttcatgaaggattaaatacaccaaagggaagtctgaacaaagcaacagaagattttgagcttacattacaaaactctccaactcacagacacttgtagaaagaagaggatagttagaagaagaaaagtttttaaatgctgaaagtcactggaagaaagcttgggctttggatgagactttgaaagatgtaaaaaatgcttcgcagaaacttcataaataagtacagagaaaaaacaggctgaaaaggaagaaaagcagaaaacaaagaaaatagaagcatgtgaagaaagttatataagctctcaaaagagaacaagggacaaagctcggtggcttatgcctgtaatcccagaattttgggaggccaaggcgggcagatcacttgaggtcaggagtttgagaccatcctggccaacatggtgaaagcccgtctctactgaaaaatacaaaaaattagctgggcatggtggtatgcacctgtagtcccagctactcgagagtctgagacaggagaattacttgaacccgggaggtggaggttgtagtgagctgaaattgcactactgcactctagcctgggcaacagagtgaggctccatctcaaaaaaaaaaaaaaaaaaaaaagaaagaaagagagagagggagggagaaaggctaaagaagaaaagaaaatcaactacttcctcttcctgtttcttctgctgatgaatctgtttctgcatcatcctcattctcttccagtcacaaaaagcataagaaacataagaggaactgttccaagtctgcttgaaattcgaagagacattcgcttagggtatccccaaaccagatagacagagtaggaaaggtgaaacccagtttcaactaatactttagcatcttttcttaaccaaaagcaagaagtggaaaaactactggaaaagcagggataagttacaatatcaaaaaacatgagtaaaagagaaagatagatactctctccatcttcagatgaaatactgtattattttggagacaggtctgaagagccaagagatttttgtaatactgataaaaccgagacaagtagtagcaaagcagaaaagccatataaatcagaaagacatttttccagcagaagaaattcctcagattccttccgtaggaattcaggaaacaagataagaatttatgattgtagatttgaacaggatatggttgtaggagatgtggtcgtaggagggaagaaaagagctctagagaaggtaaaagccaggttctatgaggtatttcacttcaccagcaagctgagaccactcctggaagtcagttgagagatacaaaaaacattcttattctagatcatgtgattttggtagacatgagctaaaatactgattaaatacaaatcaaggaaaatatgaaggagaaaataattatggggaggatatcaaaacagaggttccagaacaagatggacttatagcaaagaacactcagaaagcagcgtttaaaaaaattaaaatttactcagtatatttaatcagataggtggatttgggaaagaaaaagaaaataagacaaaaaatttatatgccaaggaaatcagcacctttacgctaaatgctgttagtaaaagttttgggtgttttagttataccagtccagggcaaaaatctctgtttctaaagttgtatgtagagattacagaaagcaaatgttttgtaggttttctcaaattgcatttgattcagttgtaagtctcttgtcacagctggatttttaggcttttcatgtgtatgtttatgtacagtatatttcttactctgacatttttaatttcttcacctaaagataattctctaaaagcattgtttcttcattgtatgatggtgtacgagagtccattatactgggtccaaggtatcctgcagtttgagagaaaattaaatctgtgcgtgaacacttgcatcattttcatcagtttcattctcttttctgttaaatttaaaaccctaagcctttgaaagtgattatatgttttaatgtttttaaataccattttatatgtattgtcagttcaaatattaaatatttttgcacagttgtttattttttttaaatagactgtatgatcaagtgcagtggcacacacttataatcacacactttggaaggctgagggcagagaatcacttgaagccaggagttcaagaccagcttgggcaacatagcaagaccccatcactgcaaaaattgtttctaaacattagctaaacatggtggcatgtgcctgtagtcccagcttctgaggaggctgaggggggaagatcactggatcccagcaggtcaaggttacagagcgccatgattgcatcactgctgtccagcctgggtggcaaagtgagacgttgtctcaagaaaaaaaaaatactatgtgaacatgagtatgtaagactctgtgttgtagaggactgggacctcactatctaaatggaaacattacttggcaaaagccaacatgccttataattattttactttgattatattttcatttgggggtttaatgagtttgaatagtttgcagatgttattttgttaaaatggaatttattagatttagaatataaattattataaattatagttaatataattataactacaaatattcttcaataatactgtacatgttagctagtgtcatttggagcagacataattaccagagtgtgtgtggactttaaaaatttcctaacattgatgaatactcaagtcttatccttatactggtagcagaccttggaactgatcctcttctttttgttgaatttttgggatctgtcatgatggcatgcaaaaccatgaaccaaaagtatggactattcatgtaaataacacaaagacttataaaaaaatacaatgtagtataaacaccaaataatatttatggatgctaatgtgtttcatttgaagaatttatagagctctgccattggtgaatgaaaactaagcttaaaacactgattatattaagcataaacatggagtggaggagtgagggaatgaagggtttgggtaaaaaagggatactgtgattggatgagctgtgtgagcaccaagatagaattttgttgaggctcaacctcttggcctaaaagccaacactcccttttgaaagggtttatctagatc

SEQ ID NO: 665 - DNA, 60461 bp, Homo sapiens
atgtgctgctggattcggtttgccagtattttattgaggatttttgcatcaatgctcatcaaggatattggtctaaaattctcttttttggttgagtctctgcctggctttggtatcaggatgatgctggcctcataaaatgagttacggagggttccctctttttctattgattggagtagtttcagaaggaatggtaccagttcctccttgtacctctggttgaattcggctgtgaatccatctggtcctggactcttttttgttggtaagctattgattattgccacaatttcagagcctgttattcgtctattcagagagtcaatttcttcctggtttagtcttgggagggtgtatgtgtcgaggaatttatacatttcttccagattttctagtttatttgcatagaggtgtttgtagtattctctgatggtagtttgtatttctgtaggatcggtggtgatatcccctttatcattttttattgcgtctatttgattcttctctcttttcttctttattagtcttgctagcggtctatcaattttgttgatcctttcaaaaagcagctcctggattcattaattctttgaagggttttttgtgtctctatttccttcagttctgctctgattttagttatttcttgccttctgctagcttttgaatgtgtttgctcttgcttttctagttcttttaattgtgatggtagggtgtcaattttggatcttccctgctttctcttgtgggcattgagtgctataaatttccctctacacactgctttgaatgtgtcccagagattctgttatgttgtgtctttgttctcattggtttcaaagaacttcttaacccaggaatacagtgaactgataagacagagccctgtcgcagaggcacaatccagtggagaagggaatgctaaccctcctgggtcaccatactcaggactcaggaaccatgtcttcctcaggtttgcattctgagaaagttctcctgcagaaacctatgcttactacatgcttgattatatttaagtaaatttgccatttttaatttaatgaaaattcaaaacatgtaagtcatttcaacatatggtatgttgctaaataaaaacctttattttaaaaataggttttaattattaataatttatattactttcctgatccacaatgtggtctagcacagaggtgttagccattgcatgaaagataggaactgagcccctcttctctcttcagaaacttggaagcaagaaacaaaagtcagacattcatgtctttactcatctacacaaatttcatattttacctttttaaaatagctttacttatatatactctacatactatacagttcacccatttaaagaattaagtttatcctaaagctgcttccttacgtattttaaatttggcctaaaagtttctcagcatgtagtgaactgtaacctaactggatgctgaaaagactgaaacctactcttgtgccaatcacagagtttcagcatatctaaggtggtcagttgttcaaactgtgttcaaataaggcaaatgccaaattataaccaattctatttctgtacctcatttttgtcttctttacatcactttcctttttctgcccataaatctttttcaaccacgaggcagtgctggagtctctctgaacctattgcagttcagtggctgcccgatttgcacatcactctttgctcaattaagcactgttaaatttaatttgactaggtttgtcttttaacaaagatgtacagttcaatgttttttgtatgttttcaaacatacaaaagttgtgtaatgatcaccataatcaaatgtacaattttttatcatcgtccaattagcagacactaccattccctcctacccctccactctcagcctaggcaatcaaaattctctacagttatgtcactcctgaatatttcatataaatgaaatcatataatatgtcttcttctgtgactggcttctttcaattagcacaaggttttcaaggcacttccatgtgtaacatgtactttattcccttttattgccaaacaatatcctatggtatggagatatcacattttatctattcatcagttgatagatatttgacttatttctgctttggggctattatgaataatgctgctatgaattttcacgtctacatttttgtgtggacatatgttttcatttctaatgagtatatacctaggaatggaattgctgagccatatggtaactctatctatgcttagcattttgaagaattgccactgttttccaaaatggctgcactattttatattcccaccaacaatatatgagggatccaatttctccacattctggacaacacttgttactatctgactttttgattatagctatcctagtaggcctaaaatcataactaattgttcctttgagttgcattttcctgctggctaataatgttgagtttttttatgtgtttgtctaccttctttagagaaatgtatattaagatcctttgaccatttttaatggtgtttttattatctttgtgtgtgctttattatctttatatgttctatacacaagtccttatcaggtatataatttgcaaatatctttgcacattcttggctttttcttttcactttcttgatacccttggaagtatagatgctgttaatattgatgaaatcaaattaatttacctactttttcttgtatttcttatgcttttggagttgtatctaagatggctttgcataacccaaggtaacaaaggtttactcctacgttttctatttagttttataatttttctcttaagcttgggtctatgatccattttgacttaatttttacatgtggtattataaggagtccaacttcattcttctgcatgcagatatccaattattccagtaccatttgtaataaagattactcattctgcattttttcaacccttttcaaaatctagtggctcataaatgtaagggtttagtttgtggacacaattctgttccattgatctttctatctattgctatgccagtaccacattgtcttgtttattgtaattttgcagtaaattttgaaattggtaagtttgttctttttcagaattgtcttgactattctgggcccctcgcactgcacatgtttttaggataactccattcatttctgcaataaaagcttgctgggttttgatagagattttgtttaacctgtagatcatttgaagattaatgccattgtaacgatattaaatctttcaatccaagaacatggaatgtcattccatttatttaggtctaccttatttcaacaattctttttgtttgttttcagactacaagttttagatccttttgttaaatttatttcttagggttttttttgttttgttttgttttgttggttggttggtttgttttgagatggagtctcactctgtcacccaggctggagtgcagtggcacaatctcagctcacagcaacctctacctcctgggttcaagcgattcttctgcctcagcctcctcctcctgagtagctggaactacaggcatgcaccaccacgcctggctttttttttttttttttcttttgcatttttagtagagacagggtttcacgatgttggccagcctggtctcgaatccctgaccttgtgattcacccacctcggcctcccaaagtgctgagattacaggagtgagccactacaccaggtcatttcttagtatttttactcttttgatctatagtaagtaaaattgtttttatctttgaatttttaaatttttaacacagttcaaatcagtgtgtctgatttcatctccttctctaacaaaccagggtgccagaactgcttcagtttctctgccttctctttgtctatgatgactaatgtatgaaggtatctgctgcatcaaactttaaacttcacattatccttatttctcttgaccttgacagatctggcatcttttcacctggctgtaagcagaaagtccttgatctccttaactttttgaggcatggcagcatgtgaggcagggagaggacacagacccacacagcaagtggtgagaagccaacagtggaattgttttcttaattccatttgttgattgtttattgctagtgtatagaaatacaactgatttttgtatattgatcttgtattctaaaaacttgctcaacttgtttcttagttctaatagttaattaattgattccttagggctttttaatacaagatcatgtcatctacaaatagaaattgttttactttctttctaatctggatgccatttatctttttttcttgtccaattgccctcactagaacctttagtacaaagttaaatagaaatggggagactagacattttgtcttgttcctgatcttagacataaaaacgttgtcttccgttattatgtgtgatattagttaagtttttcataaataaacttcacagtttgaggaagttcctattcctagtttgttgagtgttagcatgaaaaagtgttgaattttgtccaatagtttttaaaaatttttttagacaatcatgtaggctttgtccattttttacttctttaaatttatttttattgatacacaatagatgtacactttttaggtacatgcaataatttaatgcccctcactataaattcggagctgcctcctcgccgatgattccagcgcctgacagccaggaccccaggcagcagcgagtgacaggactttttaggtacatgcaataatttaatgcattcatataaagatcaaatcagtgcaattggcatatccatcaccttaaatatttgtcttttcttcatgctagaaacattcaagttattttctcctagctactctgaaatatacaatagattactgtaaactacagtcaccctactcacctatctaacattaattgatttttggtaaactaatctaatcttgctttctggcatcaacctcacttgaccatggtgtatagtccctttcgtatgttattggattcaatttgcctacattttgttgagaatttttatctatactcttaagaaatattgatctgtagtctcgtgatgtctttatctggttttgttatcagggtgatactggcctcatagcatgagttgggagatcatccttactcttctattttttggaagagtttgtgaagaattgatattatttcttctttaaatacttattgggtttttaaaatacatttttaaaatgcaacttgggtagcatgtccaataggaacaaatgagtgtccacccttgaatttcataaccctggaattaatccagtaatctatgatccacaactgtattaccaaagttcgagttactcataggaaagagaaagaagttctctaattcgtccttaaaagttttccaagttcagaaaaaaaaaatgttgaagaacacgaatctccgcaggaaatgatactcctgtacccccagctcgctctccctcacgacccctcgctaggcggggttcgggaccaggtgaacgctgatctgatagttgacacgggacgactgtggcatcatccttgctgccgtcaatatcccgagagggaggaggttgggccgggagggtctcccggggcggggcggaggaggagggaatgcaaaacagagcctcgtccccggaacccaagaagcagcaacgcccctcactataaattcggagctgcctcctcgccaatgattccagcgcctgacagccaggaccccaggcagcagcgagtgacaggacgtctggaccggcgcgccgctagcagctctgccgggccgcggcggtgatcgatggggagcggctggagcggacccagcgagtgagggcgcacagccgggacgccgaggcggcgggcgggagacccgcaccagcgcagccggccctcggcgggacgtgacgcagcgcccggggcgcgggtgagtccgcgcggaccgccaggcatgcttgggggacttcaagggcggggtgctaagtttcatgtcacggtgtcctaactgctggctctatactgggaagctctcggggaccaaggaaagagcgaccgtagttctggtcagcgcctgcccctggagctggccacactttcccaaatcaggtgaggggcttctggaatgggagggaacaaggtaggtttgtttgccacgtgcctcgaaattctcaatccattttaaccaaactcttccgagtgcaaggaagaaatctacagaaataagatgcaattcaataaactttcttcctgaggcttttagttaactcttgtattttagccatcatctgagcgggaagccggtatgactctgcaaggcgttcgtttaaaagttgtgctacttttgaggtgaagttaagagtgtctccatccacgccctctgcttcccagtcaatgtccctgcactgctcacgtccctttagctctctccctgcaaaccatagcggtgggtcctagacacgggacatcgctccaaccttggccaaactctcccaccctcagggttcccagatgtcctttgaataatcaaactgaggaaggagaagcaagatgtctccacaccccaatccctacagccttagccaatgcatgtgtgtaactgagacagaattttagcaaaaggtctcctgcttccaggactaaacagagcctctggcaggccactgcccgacacccaactccatcctccaattttcttaaatgtccaggtaaacatctccatagtgccagcctgctatagtctcccgaagacctcagcaattcttccccaaagcgtctccttctgcaccgtttttttttttgggcaaccatttgtgacctggctattgagcccacctgggcctcttctctttgtttgctgatagcctcgttaagtattaaaaacctactcccccccttcaggagccctcttttaatgaaagtttgggtactgggatcagatttgggacttggctacatttatttcctgtgtcattctgagaagagaaagtaatagaggcaagaaatttggcaccctattgatctattttattactttgttgagcaacttgtgcttccggctgaagatgctgcatcccaacatgattctcttattattagttaccacctgagggttttggatctccaggtgtttatttcacatagcatatgctttaacccccttataagtcttctctaaggaagaaactgccatacttcccttgtcttctctggtgtttccctagctataaaggccccacctgcataacctgtcctcaggctgtgatgtattcccgggtgccctggtaccttctccttcctctccaccacccttcctgacagtgcaggggcaggaaagcatggggagaagggaaatggagactcccacttaacttgctgtgtgatagtaagagcattatttcacaactctgaacctcaagtctctgcccataaggttccctccagtgatataattccttaatttcttttgttttggttattgctttaaaataaaagtctaagcttaaggctaggttatagaaactgcccatcataattgctaggtctcaacatttgcttaagttttgtgattcttagtttcaagtctgttacccactctctctccccgccaccttttttccccctgacttcattgttctttgttcccatcctgaggccttgatttctggttctgctcttctttgaccttaaactgaatcaactcttccatcatccaactcagaataaaattggttttcttccaccggttccactgatgccaatggaagacttgtcttccttgcgatttgcaaaatgtctttcagtcacaggtgctgcggcaatgctgctgtcccacagcattctaagcttcagtctttctctctcttatcgtgggtcagtattcagaaaagggcagatttgtgggttgttcaggtttctcacttttctttttcttctttctagtttgggatcagagttgtgtgagtatttgtgtatataattttgttttggttttttgttcctgctgctacttacgactgctgttattatttcaattatgactaattaatactaatgactaattttcccctatgctagagggaaaataaggaagaaaagtttactctgctacttacccaaagcccaggtaaaatgcttagctgagaaggaatttaaaactcatagtttaaatgcatgatgcatgtctgctgtcattttatctgtgctgccacagtgtcctttcaagcagataactgagagttgctgtattttgctttcgaatttgttacagggacaaaaatagtgacccctcacatttaggtgttttggctgcttaatgcgagctcctgccctctagccgcatgcttattagtttacctagccctttttctggtcagtcatgactggagaatgccaaagagtctcccaagtaggctaccaaattaagaattgtgtttagaagtttgaagtcagtccaagtgttgtaaagattaaaacgttgttttgaagatatgctgtgtcaataaacaaatatggagccagagcaacacaatgtgaccaagtgtccaagcccagcttaggaacacttttctcccatgttatctagcaaactgacaaatcagctttccaacacgtgatgattggaaaatgctattagtttccttcaaaattctcctaatgtttctttttcaaaattgcctaagatcattggattatgtggtttgtgtttcttttcactgtagctgcttgttaaagcagtatactcaatctctgataagcaacagtaaatttgatcgatttgtatcctaaatttagctatcactttacattttgttttattcataatatgaactttagcttctaaaaatcaactttttaatagcttaatatataaagccatcttaaatcaaggaatatctatagggacttaaggtaatattcaactaaattggcaagtgactaccattatcctattaaagctctaaaatgcaatatttcaatcacagaaaaaaaatcttataatttaaagaactataaattgccagatgtttccctagttattacgttagtgacaaattagacaactggaaatagaaaacagagtatatgtttggaacagtcataaaaggactagtgactattgctgctagctgtggttgtattaacattaaaatatttgctatgggatttttcttcttatcaaagcagatgctcagatgaggaaaaactctcttgcatatgaaaatcaaaattgtcttccaaaatatttaagtaacaaaaaattcattatgtagtataaatgctgtatgattacattattcttatagttaatttagaagggtttgaatttgtttttgttttgtttgtgtttgtttcttcgataggtgcattctctaactgtcttaagtagaaacaaatgtctagaatctctcagtgattatcagtctccttcctattaccaagaatgtttttattgtgttgttaatctcacatgtaatttttttaacatttaaaagtttggaaaatgggtaaaaaatgagtgtgccttgtttcctattattacaatgtgccttcctatttcaagtcccaattctagatttccttaaaacttaaaatcatagaattaataatctttcagtttaagtcaacttttgtgtgatttcttgtccacttatacacacatagatgccttcatcttcaccaaataatgtagaaattttatttagttcaatggatttaagtactctgtatgcttaagtacaaaataagaatattgagaaatacacatatgattgtgtaccttttttttttttttttttgagacagagtcttgctctgttgcccaggctggcgtgcagtggcatgatctcggctcactgcaacctctgcctcccaggttcaaatgattttcctgcctcagcctccttagtagctgggattacaggtgcatgccgccacgcccagctaatttttgtatttttagtagagaagaggttcgccatgttggccaggctggtctcaaacttctgacctcaagtgatctccctgcctcggcctcccaaagtgctgggattacagacatgagccacctcacctggcctgattttgtacttttaaagagaatttgttgttgctaatttgctaagtttatttagatattttctgattctatattagtcaaagctcctcttatctactttggaaaatgaagaattatgtctataaaatatatcaacaacagctgcaggtacttacagaggaaatactgtggatctgagtgatattaggccctgaggatacaagccaaagtataaaaatggtctttgccgtagagagatagtagtcaagctaagcacatattttggcatgggtctctaatagcctaatgctagtagggtgggaagccatttaaaaatggcccctccttctgtcctgcctttcagaccagatggtgtgtctaaagtggtcacactgtttggttctggccacttctgtaataaccactgctcctttcccctcctcgtgagattataactcctttgacagtatggacggcacctaacgcatccttgttttcttttactaaatgttccacggagtcacttgcttgcctgtttgttgcttatttgtttgtttttggctaaaactacagaaaatgttaaatacattttcagacctttatattttaaaaaagaaatgttaagaaataaataatttttctaatctcatttagatacactgtcctattacacacaatgacaaatttgatgcttttgtcttgctaattgaagagctaagcatgaatacagtttttcagtctacagcagcaatgacaagggtaaagtggagaaaagagtaaggaaagaaaaaattaaaaagaataaaaggttgaaatatcaaatcggtggttcttaagatgacagaggcaggtgagacaagaatactggaatcacccagggggcatatgaaatctgtacatttcatccacaccttcttttctccccctgtcctcattccccctgttgagacacattgtattacaaattaggaggaaaccatctaaaattatctcacgtatcccagttcccatattagcatcatgagtatcacctgagagtttgttggaactgcagaatctcagaccctgtccagacccattgattgcataagaatctgcattttagcaaaatcctcaggtgattcaaatgcacattaagggaaaagaaacacagtgtaccgtacctgtggcttgtttagaataattatgaagaggtgttttcttggctcttaacgaacgtttttaataaagctaatatttattgagtacataaatgtgccaaacacaacgttcagtctttctttaaattttttttatttaatcctcacaacaaccctgtgagatagtttctgttttatccttattttatagattgggataccaagtaataatgagataagtagtttacccaaaagctgtaactgatacagtcgagatgtaaacataagaattctaatttcattgcctgttctcttagctgttacctacagtgtctgctctatactgggctacctactttttaaggccaactaattatttgaaaatttatttaaagttttaatttgagatcaaaatctgtttccctcataaatttttttttaaaaaagcaaacaagatctattccattttgatctaatgttttcctgtcaccttacctttaagtgcaataatgggaaattctagaaattccttctttaactgtttgaaaaaataccaaaactatgacagcctgtccaaatccactaaaatatatttttatatgcatgctttttgtatatcaattatacttcaataaagctttttaaaaaaatagtagatgacatacttttaaaaattaactttggagcccaggtatggtggctcagacctgtaatcccagcactttgggaggatcacttgaggccaggagtttgagaccagctgaggcaacaaactgagacccccatctctacaaaaaataaaaaattgccagagcatggtggcgcacaccatgtagtagttgggacctgtagtcccaactactcaggagactgagttgggaggattgcttgagtctgggaggtgaaggctgcagtgagccatgatcacaccactgcactccagcctgagcaacagagaaagaccctgtctcgaataataataataataataataacaacttttgatatctctattttttcccataaaaatccaaaattttctgtttactttttggtgctctcatgctataaagtaaattctcccttggattggacaagttattttctgttttctacatacacatagactgttcagcattccaactcaaattacatattactttttcagcttttaatataaatgcttatttactacaagcatggtttacaaaaatgtagtaaaatatagttactaaccagtcaatgctcaagccagtgactccccaaatgattcagtccctgagctgtttcacccagtgcaggtagattctctgacagccatcagttggatctgtccgaatatctcctgttttgacaggggcttattgatgttggtcaaaagacaggtgtgtatgggttccctgggatcatgtttgaggggaaacctgtgccaacaggactgagcagccactttttcaatggtattgagaaaatttgtaggagataaaatttcaccagctccttgaatctagaactgtagatattcaggtagcactgacattacaacatctaatttgtaagttatgggttagggcaaaatcaatccagggctgccatcatgacaagtagtggaagtttgaaagaaggagaaatacccaaaagatatcttacacatagcaggcagagtttcttagtactaataaaaaataaagtaccagtgatcaccctctatagcccctaagagtcccctggtttcactaagccccaatatttgtggctgtggctgaatgcaatctgcacaaggttttctttttaacagttggaaaaaatctcatagcatagcatttttttctttttaacagttggaaaaattctcgtagcatagcatttttttctagtaaatttcatatacttaacaactttatcagcacatatattttccttcacacttacaatttcatcaacacatatactttactttttgactcaaattcttcttgccatcaattcaaatgctcctgcccttagaatgagaattttccattaacccagctttaataatctaactctctttcccattcaaatgatgtcacttcatataaaacacattttatcatgatgtctcccagccctcagttacacagttaattgctgccactttatcatgaatgaaaaagatgtgattcttgggtaatgatttcttgagtatgtcctggtctattatctactgagttaccagagtggatttttgagagaacacacagttattcctattccttttaatttccattaacttaagccatatgatagaacattacagttgttatatattttgtataaatataaaatgtaatatataatttatatattttaaaatatttagtggcaagtaaagatagtagtaagtgaaaaaatcactgtataacatatgaatcgtaagtgtgatcccatgtatgtgtatacctggtagatgcttgtcaaggtgccattaaggtcttgggttattggcatcttaatgaaattcatttaattatgttaggattgatttgttagtaaaatcacttacatgttttttaaatgcatgcatatctgtggagccaataagaaaaattaggaacaatatacaacaaatcttaagagcttttgaggatgattttttttctttctttcttttgtatgtacctacaaaattttctataatggatctctattgattttatattttttactttctatttgtcttggaatttctattactttatttataattcactctagattttaggtactagacaactactattaactctctggagaatggtactataaatctgaccctttctgtcatttttttttcctgtggtacactagtgtctcacaaagagtccacagaattcacacggtcatgatattttatagaagaaatcattttatgggaactttcttttgttaatagatccttccaatgctaacattattctgtataacaatgctaaagttggtatgcctaaatgctaaacttggtatgctaaagttggtttaaaaattaacctatatacaatcttcttgaataactcttcaactttaaataaatttcttatttaaaaaatcctcctatatataattaaaaatactgatgaatttgactacataaaaataaatgcttatacagtaaaaagtaccataaacaaagttatcatctaaacaagaaacctgggaaagctatttgccagccattacatgtaaaatttaagtttccttaacataacatgagctctttaatgtgagaaacaataaacaacctaattgaaacatgagcaaaagccatggctgagaaaactcgtagaagaattactatggaaacaataagaaaatgaaaagaagttcaacctcattcataattaacgaaatgcaagtcaaaacaaagatataccttttacttatcagataaagaaaaaatgatttgataaaacccagattcttggtattataaattggtataaccttaacggaggacattttatgaatatctatcaaaaacttagcatatacaaacaatttggttcaacagtctgttagaatttattatatagatacattcatataagtacaaaagtgcatatatgtaaatattattattgggacatttttgtagcagccaaaaggaaaactgaaaaaaaagattaaggctcattaatagcagactggttaaataaactatgtgtgagtacaatgaatgaaatattgtacagccatcaaaatgaatgaggtagatttatatatgctgatgtaggaaatctgctagccatcataagtaaaataaatgaaacaaagaagaaaatactatgatgtacaaaaagaaaaaactatagatatacatatttatatgcatgtgtatgcattttttatgaatatacatatttatatgcatgtgtatgcaagtcctagaaggagacataggtaactattagtagtacctctgggaagtaaatgcagagaaaagtaatagagggtaaggatatgtttacttttattttacatccttctgtaacttgacatttatacgacgcgttagcattacttctgggaaaaagaaaaacagaaaaggtaatcttttaaaaaggtattttttaaattatggtacaataaaatgtgcataagctttatactaagtaatagaatcatttaagtttagctgtagattcacaagtaaaaatccaatctattttcatattcttacatttagtagccatgtctatagaaagaaatggctaggaatgagactgcactattttaccctaaaacgttctttttctctttgcctaatgtatatctacaagggcattggggaagatgttgaccacaggcaggaagatgatgagatcctgtgcccaccacttaatgcagtctagctctatataaggaaaaatatgttcttgatgtgaaccagatggtttcactcccttcaaaaacactcttaagatgcagtgtggaagcttactctgtaaattaaaaaataaaaacctgactatattcagtggaatgcgttaatcatttttttctttttaggtttgatatttgacaaattgatctaaaatggctgggtttttatctgaataactcactgatgccatcccagaaagtcggcaccaggtaaatgccttacatctacagcagtgggtctgtcagcagttttctttaatgtgtcagcagtggggagagcgcaaaaacccacacacaccattatcttgtgaaagaagtagaggaagcagaaaataatgaaatcccagtgttaccacatcccctccaatatacagattaagagcgtttgtatttatatggttttaaacataaataacatcagaattactaagctatttccattcatgtactgataatgaatcatgtgagaaagtcctttggcaaggactccacatggccacaggtgattcctttgagcagtgttcttcctgtatagggcttaagaggaccagaagggaaatgattgtactctcttgtcagctacttcctgggcgatttgggttctttgataccccagtgctcactttcggaagtgttaagaccataaaccttaacagttgaccttctcaccttcagaaaacccaaatgtctcggagtttcattctcacaaacttccaccttcctccaatgatgagatataggaaaaaagacaatgtgaaattggagatggaggtgccctcttagcctctttacaggcatgagtcacatggcagggcattaaactctctcacaacctgttgtggagctcagcagggttagccaggactgttttgtctatctaactcttcttacatgggcctatgtgatatttttcataacaagagtccgggatttacctaactaataagatttccccacgcccctccttacaaaaactcagttcaaagaacaagccctcagcttctcctagtcccctccagggaaaatgaagagtagcttgtcctattctgaatatgttgtgctcccattttatcaaagtagaggatagatacgtaggtgctgggtgggtagataaatattagagggatgcttcttctttgctgtaacagattggcaagtaggaatcattttctggaaggtactccacagtggtggtgttagaaaactatttagaatgcctttaatcttggagataaaaatagtaacactttacagagttctgtcaatggatatctttagggatgttttgttttgggaggttttttttctgattttgtttttttcaggtatagcgaagcttgggaatctggactgtgcagattttctgcaaaaatccagctctggaaagagtgtattaagatgcatatcctaggatgacacaaagacagtatgctttattttacatcttaaaagtattgaacagaaggagttttgtccatgatatcccatcagcccactagcaggaaaagcaggacacttacccagggggttcctgctggaaatgattcttggaatcagccttccttctactctatttgggaagtctttggtttctaacattcacacatttgtagcaaagcttccaaaataactatgatgttttgcttaggaataacaaaacatggaagaaaacattctgtgaaattttaaactttttcaaacctttaagtttcagatgaataagcaaaacatacttaagtctaagaagctattttttgtttgtcaaagaactgatgttataccagttctaatattaattagcaactttgccctggttttcctgtaaaataatctccaaggccctatctcaatctgtgggcagtatactgaaatacaaaaagtgttcacaaaaggaccttctgaactttgcaatctccctttaaaacttttaccaacttaaaactacagaactctgatctcttattgatttaaactagtgatatgtaaacagcacttcagagcttgtttcacaggaccaaaaaatttatgctgaaatctactcatgacaaatgggaaaaccctgattagcacatttaaatgaataaataaagaaccgtattcaatggcttaaaatttatagacctgcatcatccattatggtagccatttactatatgtggctatttacatttaaatataaacgtattaaaattaaactaaaaattcagcccctctgttgcattacccccatctcaagtgctcagtagacacatgtggttagtggacaacacagatttagaacatttctatcataggaagtactactggacagtactgctgtcaacacacttattaataatgcagcagactttcttggccacttggtaagaaagttttctgctcttttaaacttatttgggaagtttttaatacttttgaaattatgatttcctcagtgttagattatctgatatacagctctcacagaccattttttgtttttcctgtttgtttgcatattaaaatatataggattcaatgtttcacgtgcttttctaaagttgcagttcttgatttcttaaaattgtgaaaagaagtacccacagttatattaagaactaaaatatatggctgttggcttggttaccaacattgctgacagctccaagtaagcaaaagtaaaaaagatgtaggatcatttttaaaggccaatattttcttccttactcattaccttctgtaaaattctgtaagattttctttagttttccaataatgataaacatttcaccattgcatagacataattaattgattttttaagcagttggagagccaaacaaaataaggggtagaatacttcttattttattttttaataaaaatgtacatattagaagcctttatttttatttaaattgtatgtcactgataaggtttggatatttgcccctccaaatctcatgttgaaatgtgatcccctgtgttggaggtggggcctggtgggaggtgtttggatcctgcaggcggatctctcatgaatggcttggtgccctccccatgttaatgaaagagttcttgctctggaactgtgacacctcccccctctctctcttgctcctgctctcgccatgtgacatgctggttccctatcaccttctgccatgattgtaagcatcctgtggcctcaccagaagcagaagctaacaccatgcttccttgtaagcctgcagaaccaggagtcagttaaagctcttttctttataaattacccagtttcaggtattcctttatagcaacacaagaatagaccaacacagtcacggataacagtagtttttcatttttcatcaatataatgatcctgctgtattcttaaagttcttaatcactatttgtcactaatacgataacattaataaaatttgagtctcagttactttccagtcacttatacctagcagttcaataacatttagttcctggactaatgatcatgtgttatataaggcaaaaaattaaaaacaaatttgtctttgagtcatcaaagcatcaagggtttgaaatagctatataactagctgtgaaaaagggatataaatatccagctgatatttcctttacacatttaatagtatcatttttcaatgaaagcataaataaaataagtttggaaccagtttggaatttttaaatattaatcgcagaatcttactaacagaaaacaaaagcaagataaatgctagtcatttgtgcctgagtttttttttcaataaacagaaatgaagcttgctttaggaaacatgtgtactccaaataacctactattcacacaattctcagtaacattctttcttttgcttaaataatacagccagatgtgcttagcacataactctatagaaaataataatttaaattagatttaaatagagatagatagacagacagacagatagacagatatttttgagacaaagtctcactttgtcctctaggctagagtgtagtggcatgatcatagctcactgcagccttaaactcctgggctcaagccatcctcctatctcatcctcccaagtatctaggactacaggcacatgcactatgcccagctaattatttttttaattttttgtagagatgtcgtcttgctacattgcctaggttgctcatgaacccccagcctcaagtgatcctcctgcctcagcctcccaaaatgctaagattacaggcatgaacccctgcacccaaccaatattaatatttttaacaattgaaagagctcaaagaaataggttttaaatttagaggccctgttttgctgacaggaaaggcttttagctggaatcaagagtgctgttgtcttttcccttcaattagtcattccttttaagacttttaagatttaaatgtatgagtcattttttaaatcccagaaagatctagtatatctcataaatgtaataatacagtgcagacctggtggaaaataattatttatctgaaactgggcctcagtgcctttcctgaatctaaacaaatgttcatctcacccagagaactgggacaacaggaacaaggtattgcaagtccaaaatccaatccaaagcagcgttcttcctccccacctctaggcaaggccaaaatacttctgcacacagtatagacaccagaaaaaaacagagccactgtagatgaaaccagtcagggggtaagagctgtcttttgatctagagcttgcacctttgctcctcagtaatactcccaggtcaaaaaggaaaaataagatgggcagttggctgcctcctggtccctccagcctggtcagtgaacagagtgggaagataaaacagctaagtatcttccttaacaatgcaaagcaagaaatccagtctgctttgggaaagtgaaagcaatgcaaattcagattattaatcataagagcatctcatgtgatatacaaaattattgtatagcagtaatgggtcagccgtattttattcaacactgaaccattaatgaatgctagctagtcttcctttcacttacagaatgtttatctatacatgactaaacaaagaaggagcgctggaaatgatcctgtgaaaaatactggctcacaatgtatcagctgagtttggggcaactgaggtagtaggaggcgccccctggacttctgctagaatttagatttaaatagatggatgaattagacaaaacatactctctgaaagagtgagaaatacaatattcaccaattaagtgaaggaaaaatctacactatgaataaaacaataaatgtggatacatttgaaaatttgaatttcaaaccccttaagataatgtgacaaatacaacaggcctaatttaacatcttaaagagatctgtgtgacctattttgcagttttattttcttaggacaatgcttcagtatctttaactttcatatttaatcattttttttcttttttggtttctatggtatcaccatccatcaatccatattggttggagggggggaatatatatatatatatatatgtatgtctcccaagagaaagtaattctgcaatcttcctcagcaattcagtctaacaattaagaacccttaagctaaatagaaaaattcatttcacaggcaagttttactcaatatgtataattagttttagttaactttattaatgaaatgtcgcaaatcaattaggtttgcaataatcagatgccgaggacccaagaggaaccattcctctcacaagaggggaaggtgatacacaatttagttgggaagcaaatgtaattagatttgatcaattgagtattcctgtcctgatgtggagtcagtcacatacccaagcctgagaatatatttgaaaagaggtagaaaaaaacccagtatgacttagaaaatgtccttgtggtcctattggccacaactggcagccaaaaagggctttgaagccacaggtagacaggttttgttcagacagggctatgttttagatttctctttcaaatctgaatggttttacgtagggcaatatataaactttcctatttgtcacagattctagcactctttaatgccttatactgggtgtttcacacagttatttaactgcccaaatcccaatggcacttcagtttgcaactatcatgacctagaagttagttattgaacagttatgaggtaacttaaagtttcttccctttgcctctagaataagaatatcaaagaaatgtcatgatgataggaatactactgaaagaggatattaaacactaggtattcctacttagggctacagtttgcagcagattctattgtgtttcagtcaataagtgtttttggacacctacatgccagacactattctcagcattgagcacaaagtcgtgagcaaggtagacaaaaatgcttggcctcataaaacttacattccagtgcataaagatgagaacaatcacgtaaaatttataatatgttggatggcatggaaaatggaaataaagtggaagggaggcttcaggttaaaaagagtgtttagggaaggtcttcttaggaagaaggaggaagctatgtggacatctgggagaagatcgctccaggcagagggtagagcaaatgcaaattccttgaggcagcaatgtgctggcatggtcaaggcacagcgagtatgccagggtcttcagaaaccacagagaagagtggataacaaaagtgaaatcaagtattgaagagtatgaactgacaggaactagagacatatttagaatggatgccggaacaggagaaatgggtgggattttaaaagctaaatgatttaaagacttaaaatgctctgaagtgtagtgaaatgttccccaaactgcagattttcccaggaaaccaggtgcataatttagtcatcgatgactggttctgtggcaatgactctagtaattagacccctgcattttatgtcagttccttctggatactcagctacattatttggtgcttttggtatacttcaaatatgcattgcctatcactgacctgtaatcctgtgtctctgggcctgaaaatataacttttcatgtagtagagaattagggctgtgcaacattgccactagattatttttaatgaaagctttgcccttttagataaatacagcaatgtattcaaacaagtcctagggataccactgagtgcaaaatgtcatgtactagttattccatttaaattattttatcttcaagtctaataagaaaattctaaataaaattatatatttgggattgtgtgtgtatcatccatccacatgtaagtaggaataaaattatttaatggaaaatttcaaataggctaactctaaaaatgtacagataatctgaatgagagaaaactatcctcactttgtgttatttttcaatggtagcattttctcataatccccatgcttttttcatgtcctgctattctttaagatttcctaatgaggattagggaataggcatatttaacaatctgtgttcgcaggttgaaaacaagaaaatgaagactaatagtttctctcctgttaatttgattttctacagctcctctcctaccagcttaggcagaggacttagttactatttccaatagatgggagccaaggaaaagacaagcatctgtgatgtcatgtctcccccaaacgggtagctgcctcaccagcctccattagagacatcccccagagtaagaaataagaaataatcatgagtagaatgagaaaaaaatgcagcttcctttatctgagaaaaacaatagtagctcaatgctgtggcctaaagggctttgaaaataatgcaatttctgataaaaataaatgccattattcttgcttattgtcactgttttagtcaaataagattttagcaagcatatttcaaattgttctaaatctaagtaaattggtaattaaatgctatcattagaaagtattttaatatcagaaaaattggaccataagaaagttagtttacccttgtattcatatatacatgtgctttgtgctaaaaattgttatcatttagtgagaacctgtgactatattaattaatttaatttaatcttcatatttctctgaccgttagagagtttgtgacttggataactttcaaacaactagtaccctgatggaaatccagaattttgttaacccagatcacagctgcatacttaaatgctatgcaacagtggcacttacccccaaaccgtatcctatggaaatgcctttttagcaaattaaactgaattgtgttcagagatccacaggtctaagcaacattagggaaggggtaaagtagtcctcagcaaggcccttttcagagcactccaccagtgcccttgtcctcctgggcagagctcctcagctatactccctttcctagtctaccctatcccacaacggaaccatacttctctcatggaagccctggtctcacagaactaaaaaggaggctcctagaaatggggttgtgttgagttgacagagatgtgtggctctttaaactgaaatataatccaaagagaacaagatctagtagaatttcaggtcctaagcctggttaaatttcaggtcctaaggctggttaatagtacaaatacagttatttatttataactagtgcaaatacagttatttatttataactatacaggaatttatttcccagtaccttctatattactaacatcccataaaaccagccatgtaaggaactagaacattttgagaatatgcaatacataaccttaaacaagaagttttcattcctaattaaaaaaaataagctagttcatcacaacttccttcaaatccttctgccactgatttctctcctgaaaagagatattatacggcattttagagaaaacaaacatctctaagtcacaaggagtggaataatcaaagttgcattttaagcaagattatggttttttctttgagttctctgaatttgaatagtttcttaaccttagttttttaactgctctgaaaatggtttctgtccctggtggactcttgtttcaatgcagttattttgtctggtagagtcacagagttaagctgtcattcagatcagaaaaaataaaagagagagatgaattaatctcaatggcacagtctccttattcaaaaaataaaaataaaaataaatctcaagtccaacaatgaatcatctttgagactctcccaagtgatctagttttaagggcaaaaactttggggaaactgttgggggagcaactggtgcccagtactgtttcacacacgtggtttttcttatctattgctcacacacttagacataactggaattattgcctttgtattgttgttgccattttataaaggaagacaaaaaagatcagacaaaataatagtgaacatctattaattggacacttactggtgtcaggcactgtgtcatgcactgtgtcaggcactgtattttcttatttaatccaacaaaaaaaataggctaaattatcttattggctcaattttctttacagaaactgagcctaaatttcccaaatggctaaccaatgccagggccagcaactcaaatttgggagtaattccgacacctaggttccaaccatttttctcccagaaataacccaccaaattcaccagagtctaagatcttactgttactgtttaattaactgctacaattgcagcattttaaaaaaatataaatgagcactgtgctagtatttaattatagctttatactgatactgggtacaagtataagctaacaccattttgaattatagtagaagagtcaggagctctgagaggaatgttcaggatagaataaagcagatattttaatgtctcatttcagtgaggaaaattgttaattcatatgccaccagccatcggcagaaatgtaacaggaaatgaagaaaaacttaattactttaaatacagtggtctgtagtacaaattattgtgccgtgaattagtttccttctgctgtagaattgatcattttgattatgtagccaagcagtgtaagacattactaaaattattcttgaatcctacctttgagatctatataaaacactaggcaatttgcctgcaaatacatagaaaacaatttttaaaaggattgggatgagttattttcccctctgttaaatattagcctttgaaatgaacccagctgatctgccaaataacacttggaaattgttgtgttttaataaagtgacagactgagagggaagccacactagacgtccttatgcttttagaggccttacagggcaggaacattatgcaataatgccttttaaaagaagtgagcttcctagtattacaccttgcctggcaacaaatgtagccacttactgaaatgcaggcgtaattagaatctatgaaaatctagcatcagaatcccaaacctctatgcaatactcagtaaattacagcttttatgtctgtaatattttcaaccattctacttaaatatgtgaatacatgagtgtggagttctttaggaggcctgctgcatatgctagggaaaggtttcatcatttctaatcaggatggctctgtaaatgggatgcctcatgttcaggtttctggaaggctcagagcctgggcttctactggcagagggtagacccaaatggactactctagtgaaaatctccaggtgaacatggaacgcagtgaaaacctggggtatccaacttgcagtataggccaccagcaagtgtcacctctattataactttaaccaggcaagctcagtctcatgcattagtttataaaattgcaacagagccttctaagactgaaaggacattagtttttaaacctatatattatgacctaattaaatgaaattttattttaaagccctcataaaagtagtaaaattggtgttttaaataaaccaaatgggaattcaaccactttaatttttcttttgttccaataggaaaataaatgctttaaaatttgaagttgaaacatgggttttaaatatattgagataaaaactattttgcataggcattttgaagaaaataaattttgttctcgtgatttgtgattggccattgatttccgtgtttaagattatgaaggtgtgctcagctgtctactagaaataacaggggagactcagtcttgtttcaaatggaagggctcctattcggttttctccttcatttcttaaagtgttgtgatttttttattccctggtgttatgtcttgagattttaaatcttaaaacatgcaattaggtattgaagttgaaagctggaagtctcagccagctagtaatggttttttaaaataggtaatacagacctctagtggttgaacagtttgaaagcctctgcaagaaaaggaaattgcgcagaaagtgcctgcattttaaggggaaaagttagttaaaattattcagatgataaaattcacatatttcataggaaaaaaaaagccagaatgggcttcaagggaaggtggcacacttcccatccttttagatgttcctcaattcctctaaataagcaaaaactctctggccaaagtcacagtaagaagtctggatctgtattatttttctctaaaagatcttgtgaacagagctgctagatctctgtattatatgaaacatatatttttgtacacagttttgcctcactggggctttgcttcctttgtactccagaggctccccatgaaaacaatctgcagccacctcaacttgcctgtgctgttctcaggttctgtccatggggagccacacttcagtgagctcagcgattggatggctttttagtctacatgagagggaaactccatgtgcctctagactagtgcttctcaaactctaatgaacacccaagtcacctggggaatctgcttgaaatgcagattctatctcggtctggggtggggcctgaggctgtcttgttcgtaaactcccagttgatgctaacgctgcccatccagggccacccagagcagcaagccggttctatgacagctctctttattttttagttacatattttgtttttactcatttcttctttgtttgctcttttactttaataacttctgttaaatttttaatatttggatctgtaaaacatttaaagttctctttcacttcactatgtacaagtatctctgggaatctgttattgaagttttgagaagttgatctcacattttaaaaatagattcagtgtcatctctttatcttgaaaagttcatggtagttgtgagcatctctctaaccacttgaagctattgggttagaggtagctacaattaaatatctgattagccatattgggagagtgggtgaaaacaggttttgtgcatgtggtagatgtgtaggaagctaaggacccaaaaaacaaccacatcataaaatcaagcagaaacacacacacaccacacacacacacagaggctcaaagcataagtgtcaacagatcagaagaaaacatgggagaatgtattttttcataccaaatctattaaaattccatcatctaaataacttcctatcatagcatgttgtcgacctcatttttcaaatccataattttagaacttatgtcgtggggtagtctaaaagcctcttgcaaacttttaacatctagtttcaaatcaaaaataatatattaacaagctgtagcatagagggagtacataaattatcatcattgccctgcatgaatagtaattcacaggtttggctcacacacaacttagatgaaataattaactatgtacagtacttaacagtataaaagtaattaatctagctgcctcgtaccggtttggcctaaataaacatgcaataaaaaagccataggattttattatttttttactcacgttactactttagtgtgttggaattttaatatgtcagaagaaagatatctttgcattaaaaaatcattttcttttcaaatgttaatgtactgattataactaagtgaattccatatatttataattgtgggcagatgttctcaattaatagttttattcattctacttcacagtttagtgaaaaggattattttaaattaaggtgtaaataagaacaaatgagatttttattactacaaatcacacagaatttgttggtggtgctataatcctgtgtaggtatagctttggcaaaacatttcagataagcttgttttttgccccatgggttctgggacgaggtgagttgtctgtttgtcctataaggttcagaaaggtaaaagggcaaggtcattaattggctagagggcaacaaagaaggtagttatccctgtgtggtcaagaaaaaagtggctcaggttatcttgctcgggagagaaaatgttcattcagctccagtccttttggtaaaagcccactctcagtgtatgagtgttcctttgcctaatcatgtagactataacatgttttcccctatatgactccatcgattaatcattgcagtattatccccacttcataaatgggcaaagaggaggatgaagccgagtagttcttccaaaatcaagtagcatgtaagatgtaggagcaaaactcaaatccagagacttctgcttccagccaagatggaataacagggactagatttacctccccacctaaaacaattttaaaaactggacatacatatgaaacaatggttttcaagagagtggacatcagataacaaagggcagtgatccctggaggataggaaacaaatgacctgggattgtcccagcccactgcctggagggagtttgcaggcatgatacagggatggtacacccaggcagaactcgaggtcctctctgagttaaggacacagagctgggagtccagagaggccaaggaggctagagttcagagtaccagagagttgagagctgcacagagaacccagagatctgcaaatggtaccccttgtgcttcagtgcatgtgggcaaataatcacccaaacgtattagagagaacaagccccagaggtcatcaagagctagaaaatagttgctatttccaccagccacagtggaaagtctcataattcatggagcatcaggtagcatactcagtaggttcttgcctcaggaatgggaaaaatttagccctagactaattgctgctctggtaccacctaagaaaccgtaaaagtcagactcaaaagaattaaattatttgcaagtaactcaactgcttttcagaaaacaactggagaaattttgtaggaatacaaaagcatccaatatccaacaaagtaaaattcacaatgtttagcatccattataaaatcaccaggcatgcgaagaagctggaaagtacaacccataaaaagaaaaaaatgaatagaaacagacccagtcagtaatgacacagatgataggattattacactattacattaaatggttattatgactatttcatatgttcaaaatgcttgatggaagtttgaacatattaaatgaagacatgggagatataaaaaagactgaaattgaacttctagagatgaaaactacaatgtctgagatgaaaacttaaactgagacttcagatgctaagactacatttgtttcacatccccacaacattcttccctggacgctgagtttcctcccagcagctgaatacttcatgcttcatcctttcttaatgctgaactctcagaaaaagtccttcattctaagaagaggcgggagggtgccactctgtagcccctttctcatctcactctggtccctgctggcctggaacagattccactcccttcatgcactgatactccactctagactgagcctcttcatgaggtagccatcaagccatccgcagtcatcaacatggcaccttctgagtcagttacaagagtttgcatcatcagaccaccattttccgtctctgttttctgacttaccccaaaactctagttaaaactcatgaaatattatctcttcacatgaaatacaattaatatggaagtcagcatttttgcatctcccaacgcttcacatccaaggagctgtgtatgaaatcatgaactatgttcttccagccaaccaagcaattaaccaaagtatacatgtccatgttgtccttgtacagagtttgaaatatgctcatgagaattaaactatttttcagtaaatctgaaaaatcaacttgcttgtccaggaagttttattagggatagaatcccaaacaatgaatgtgctagccaagtgttactattaatcagaaatactccatattcatccaggattaatcctgtgtaactccctcagtcagtgtagcaatgtgttctcttcctgcactttttttatgtgtgtgtattcccaaatctgcagtgaatgtatttaggaaatacattagtatcaaaaggacaaatgtagccttaaaacataaatgtacagataatttcctatttgtagcaaagttcacttcagaaacacttgataagaactattcaaaaataaatattttcagtatttatttaaaatattttaaaatgtaaactcctcaccagtcatctagccagggccactgagtgtggctctatgaaatagcttcagtccctttcactactgatgaccttttgaacacaagataatatttgtcgagtaaatgtcaaaatagtataagaatacccaaatcatggattctatgctgtattcactcacatagagacttcactttggagcacttcagagcagcaacagctctaagagatgtaacagtatgctttccaggatagaagaacgaaaagggaaaaataagttgctagcaagaacaatgaggggtaggggtgaagttcaggctgccattctgaaagcttcctcagactgagtcaggcacatctcacgaagtgcagactatgcaagctggctgtgtgagatcaagggtagacagttgactcatcctgtcacatctctgtgttttaccgtaacctccaactattcagccatgaatcgctgcatgtggaatggaagggggaatgtctaacaaacagagacatacttcaagtcttcagtctagttaaaacattggaatgagggtctgcaacatctttctggggcttggagtctcgtctcagttctaaaatgagatggttggcctggatcctaagtttcaaattggcagcctttttaactaaatctaatctagaagagttctgttaggttccacagtgttgggttttaaaatatatatatatattagttgaaaacattttaaaataggatctttcacatgaaatttgaaattttaagtttatattttaaagttagctgttttcccccacctcattacaattggcacagttgactatagctgagaagtgaccccgtggcccccctccaagaaagggggagggccctccattcaccaccatgtccacttcacctatttctcccagcctatatatgtatttgaatatgtgaaccctggaatgcataatgtctagggaccataacaacaatagaatgctatgaatctctgacttacaaggactctcttatgaatctctgacttacaaggactctcttatgaatctctgacttacaaggaaaacaaaagactgtagagaatagtagttcaaccacattttaggttaaaatagactttacttggataacctgacaaccaaaacatctttgataatatagtaattgtgtatgtttaccagacaaagggtatacatgtatattcttgtatttctcttaagaagaaaatcaataaatttgacccatgaatttctttctatagcagacatttttgtgacttcctgactcacaggagatacagctaccctccaaacctaaatcaaaagtccgtaagttgcagaatgactttttatgtaaagagaacatactagtttctgataagatataaagaaaccatgtaatttatctagggaatgactctaagctgatcattgacttatttacacaactatagctactggaatagactgattccaaaaatatattttctctgaattagaatctttttcatatcaaaatatccaaaattattagcatattatgttattctcacaaagtcctaatgaacttcacaaatctgcctgctctattctgagtacaaaaaatatttagcctaatttgtttttccattattttatatagtaataaagtaataccaaaaatgttattgccagaaacaatacagtgttgtataattattagaaagtgaactcatgaaattctattaaaaaacaacaattaccacatgttaagtcagataattcacagaagagacttatatgaatactaggggagctgtaggcaacacaatttttctctgaatcctgcattttgaaggaagtttctgtcatttaattagttgaggtttgattcaccaaccaaaggtctatagtgtgatatattttcttcctccaacataaagttaacttaaagtcatttgtactttatgtgtttattctttcacttcttccccaaaagtaattctttaaattgctttatgggattaataacaaattatatcattatatatttttgtattattagggcttctaacttcattataatcaatttattggccatatataataatgcaacaaattacatctgtaaagtaaaattttatgacgcaatttacttagtatatgtataagtctcattctgctgcccaggctggagtgcagtggcgcgatcttggctcactgcaaccttcgcctcctcctgggttcaagcgattctcctgcctcagactcccaagtagctgggattacaggcatccgccaccatgcccagctaatttttgtatttttattagagacggggtttcaccatgttggccaggctggtctcaaactcttgacctcaaatgatccacccgcctcagcctcccaaagtgctgggattacatgcatgagccaccacacccggccggagacaggttctccctgacctgtgagactgcaaaggtggtgtttcctatgagtccagccagataatagactctgctaacattaattaaattaatattcctttttaagattctaggtgctgaatatatatctcttggtctataaattagcttcgcacttcagctatttagcaaacttgttttttattgtatctagtgtattcatactgaatgggtataatatactgtcttttgaaaaagttattttgtacacataatcttaaaacactcttccaagggcaaggtagaggcttcataatattatttccatttgtcagatcaatgaaggtttaatgatttgtccaagatctcaatttctagagaagcgaagaagaatcccccaattctagttctaagtttcttttttcccttgctaaatcctgcagtctactgatttttttttttttagacggagtctcgctctgttgcccaggctggagtgcaatggcatgatctcagctcactgcaacttccacctcctgggttcaagtgattctcctacatcagcctcccgagtagatgggattacaggtgcatgccaccatgcctggctaatttttgtatttttagtagagacggggtttcaccatgctggccaggctggtctcgagctcctgaccttgtgatccgcccaccttggcctcccaaagtgctgggattacaggcgtgagccaacatgcctggcctgcagtcaactgatttatgttcatcaccttcttaagttaaattgctcttttactcattgcctttggttttgtgtgttaagattcagcatcagcattcatgatatcttttcactcttaattctgagtgtttccgtccgtttttttaatttttgtactttatgggctttttcttcatttacccccaattatgcgggaaaggctgtgtgcctcttttgaaagctctgatgttctcaatgaagagaccttttaaatgaccttgtttgtcccccaccgagttgcatatcacaacttcaaatgtctcactaaaatgttacccatttggcatcagtatacagaaaaggctgcactctgagataagaaagaacagtggtgttttcatagtaagagaatagagttcttaatgggaaaggggagagtataatttccactgatttagctggtctttcaaactttatgatgcttttctccttgaactagcctataagaaatttgtagggaaaataccacaggaatcaaattttgggcatagatgtctattaatattgctccttacaaagctttttcccagaattgtttctccttgcctacaaaaactactccatgcctttattagtcagaaaagcagttttgtagagaaggcaagtaacagagaatcaagctaagtaagtgaaactctgtaattgtcaaacttccagaaagtaacatttgtaactaagtatggtatctttgtcctctctctttctctcttctctccacttggtttctaatgaaagccttgattacatgttatatttaatgtactgttccacaaagaagaaaaggcctaatgtgaatgcaagctgaatttacacttaaatattgcagtcagttcagaccggaaggatacagatcgatgccctctgatcctgtcagattccccgaagtgtctatggcagtgataccacaagagggcagggtttgacttccggactaggtggcttcctcccttcagtgcagaccttggggccacgacaacagccatcaatctcttgaaaccctaatgatgaatctgagctcaaattccctcttcagccttatctgtgcagaatcctgaagttatgaaaaatgcttacagaaggtaatttctagaatgatctaacacagcagatatttagtaaactccctgtttgagagctcctactaagcacccaacacagctttagactttggtcacccaataggattttatcttttgtgagggatctgtagttttccccggaagatataatgcatgaaataaaagcctccaataaaattcagtatacagttaatttatttcataaaaagtgagagatataaattatcaaaggttaaaacaaaaagtaggaaccagagcagggtttttcagtagcaactctattgacattttggattagataattttttggtgtgggagactgtcccacgcattgtaaaatggttagcagtatcacttgtctgcctgctagatgctagtaataccccccacacctccctctcccacattgggaaaatcaaaaatgtctcgagacattgccaaatatccctggagtacaaaatcagtctaattgagaggcactagactggagtataaagagatgaccatgccaaaaagtaaaaataataataatagagccttgaaacattacttacagaatgtcaaaaacgtaaggacctgctctctattcctgtttcttaacctgagcaatgggaataatgatgccttccctcataggtctcttgtagaaatgaaagcaattaatgcaacacttggcacatagtaagcatccaatgaataataagtgatcagtgttactattgctaatattaagccactattataagtcctttctgttaatcagcagaaacaaaaagaagtataaaataatggtacattaaatgaacttaaacacttgtatgtcattttgtgctaaagttatgaagctgaaaagattgaattgacattttccccattgatagaaatcatctcaaaaatgctccatcttccttgtgaaagccaaaggccagcagtttccacatacccagcatctgataagtagttaatgatccagaaataaactgttaggtgcttcagggaatttctgtgtatagagaagttccatgtaaatatttctccgagaggtggatggagaatgataattcacttttaccctctgaatttgatttataagcttcacctatctggcaggagataagaaccaaagttaactgaggagaaaaaaaataaatgatttcaagtgaccatgatcttcagctggaaccagttgaaactgcaaagcaactgggctgaagaagttcagccaaaattatttgtttataaaaactagagagtgttagatatttctatcacattggcttatttgaaatttctgctggctcaaatgaaattgtattcttctatttcctactgcggggttccttccctaaccacaattgcttttggattggagacttgtaactttgagaacaagaagagcctcagcttagctagctggaagaaccagaggagagttttaatatctcctgaagaaagaaaagcactaacacggttattatagttcaggacaagtggagtcaaagttgacagtttctgacttgaacagttttgttgctggtaataaaagcagaagtcacgtgctgaacgtgaaggtgagcagaggagaacttgcgatggcaaagttaaaaacaagaggagatgatggtcttggtgtggcacaggatgttaaaaaaattctcctgtccttaaggagttactgctatttgagtaatgtgccacttccctacatagccttctatgcagaaatgctatatttccacttcacaacccagaacgtgcattttattttacatttagaggaggaacaaacaaccagaaggcaaaaactggtgcattattttttgcaattctcttggaaagagttcgtttttaacttctgctcagacagcacacaactactgggaatatattttaatttcaaatctgatgtgtgacatctggtaactcatttattgctaatgaagttttcacaggaagcagcagtcaccagtagctcatcttatttttcagttggcaaagtgttgtttaccttttattggcctggcatcggtgtctcttatcacaggatatttaattagaaaacgcaagtagcctaacatagaaaagaaatggagtggtagataatagtagatagaatggtctaaatatttttattacagtgatgtaatatcactgtaatttatgtttaaaaattatgtaatactcaaaaggaattctcagagctggcgaaacagtctggtccaagcagcctctcagcagtgcctttcagcctcccctctctgagtctttccaccccttgctggtactttagtttcttccacttctagcaccacgtgtagtttcccaatttctcttacccaaatttgctcgcagggaaaaaaataaattaaattagccatttacaccacagtgtgaacttaataacaccaacaaaagttccaaagctctagggtctcatagcacctccagatccatgatctcattcggtgtttccaacaatgttttgcaccaaactggacacatgcttgctacttcatcatcctcatcgtgaacattattattattatcatcattttccagatgaagaaaatgaatcacaagtcaactgacagtccaaaggctccacagctcagaggaggtaaatcatgtgcttaattcagaacttttggctcccatcactatgctcttcccactgtcttaactctggttgtcacctgagccattgtgtttcttctcaggtagatcttagttcttcctgagaaggtatgaaggtgggtattccaccctacctgaattataggaatttcagatatctgtgagcagctgcaaaggggattttactagatgacatcctgctgggcacactttacgccagtcctgaatgtgtaatagaaatctgcagtttaatgagtaagtttctcatattcagtttttgatgcttcataaatgttaaatgaaaacattttagctgagggtacttttgttgtttgttggattggttttgcctgttcatcaggattatcagcatttaagccagagttgcaaattaagttgcctacagggcagtgcttttcaaatattagtgtgtatcagaattacctggagggctcattaaaaacagcttgccgaaccccacccacagagtttctgattcagtaggtctgtggtggggccagagatttacatctctaacaaatttctgggtgatgctgatgctgttgtttcagggaccacactttcagaaccattgctagaggggccaactaggggacgtctgtgagtaaaagcacctacactgtgcttccagtacagcagccagccccagtgtgatgagcacttgaaatgtcgctagtgtaactgaggtgtcctggaagcatacattataccctgggttttgaagacatggtacaaaaaatgtaaaatatcttaataattttatatggattacatgttgaaatgacaatagtttggatatattggattaaatattttatcaaaattaattttacctgttcctttttacatgtcaaatgtttttaatagaaaaattacaattatatatgtgtctcactttctatttcttttggacagcactgaactaaagaaccagaaaatagaggggtgtattagtgaactacagaaaattcaagtcccaaaagctgtaaatactctgaggaccaaagaaaatacatacgttgttcagatttgccctgaggggtcagtttgtacccaaacatttgctgccacaagtagtaaatgtagaagcaatgcaatatctactattttacttttctttcagggttaatcaagtgccttgttataattcttcaaactaaaaacattattataataatgaaaaatatttctgctgaacttccgaataaaaaaatttagtaatattttgaaagtctgagctttatttaattcattttacttacccttgtattatagaacaattatatttttaaaaatgcttttatgtcttccaaagaactttttatttttagcagtccatgaaatagaggtgagaacaggtgttggtattctcattctaaatatcttgtaatatttaaaggaaaccaaagtgaaagattaaattgccatgtaagattgtgttgccggttactggcagagcagactctttgccaggacagcagtccagtgctttctcttccaggctgttctgctcttcctcaatttttacagcatttttatgttaatcaatcaataaataaaaagtaaagaactataatgcatacaaaactgtgatggaagaaaaggaaactatgtgataaaatcaaataaatatgacccttatagctttagttttcttagaacagaggccctttaacttcagaatgttgaaaccttctcttgaagttctcttataatactctgccctcacctctgtgtttttatctgggcaattagaccacattaactaattgctaaactttaaaaagttgtattttcttacaaagaatctgagaatagggttgattttctatgttattttaacagtatcacattgcgcccccctcttcacaggaccatgtaatcttgactctctaacttcatggcaagcttttaattttgattttcaaccatgttccaaactgtactctttgacttggtagtgtcaataaataacgtaagggatgtctgacaggcttacagcctttggccataaatggaatgaaacaaagtagtccagatagggctcaaactcataacattgacctcgttagtctagaaccacaaccagctatccaaatgtgcctgggaaatatttctttgagtaatagttaattttttaaaagaaagaaaaaaacctgtgactatgataatcttatgttgagtttctttattcatcttgagtaaacagtaaatttttttcactttgttgtttcaatacaaagagttcttgtgtttaatatagaatattattaaattagtgtgggattaaaaatatttagatagctgatttaacaatatgtgatagcattaatcaactgccttgttataattcttgaaattgttattactctacttgtcaagcaattttgcccttctcgtcaaatgatgcatacctgttcaatggaaggattataaaagttcatgcttcggaaaatttttttttttttttttttttttttgagacggagtctcgctctgtcgcccaggctggagtgcagtggcgggatcttggctcactgcaagctccgcctcccgggttcacgccattctcctgcctcagcctcccaagtagctgggactacaggcgcccgccactacgcccggctaattttttgtatttttagtagagacggggtttcaccgttttagccgggatggtctcgatctcctgacctcgtgatccgcccgcctcggcctcccaaagtgctgggattacaggcgtgagccaccgcgcccggcccggaaaatttttttaagagtataaccaactccccgaggatacaggggtccagggaagctaaatgactgcttcaaggtcacccagccagtgagtgggaaagctaaaattagaacctcagtccgctcccacattttccaccaatttgcaggctatcgttaaagaatatttcttctgcaatcagaacattgagcaatttggaaaaacgtgtacagtatatcgaatattctagcttcatttaaaatttatggttatgtggcttgtataatgttaaaagctttaatctaaaatgaattgccatgtggccaataaccccaacataatactcataatgcatataaattctctaatattatcataatttcttaagggtacaaattaattagtacctcttttcctgcccaataactttcctcacaccccttaaaatggaatttgaaatgagataaacagttgctgctgctgaattaaagtttcaaagaaataaaagtgaggtggcttcatatacaaaatctgtagtttttttcacaaattggatgaagcaattgttattgactaagcccatattggtgctgcccttttctctgttgaaaagaaaagcttgtgagtagtctccaagagccatattattaaaaatgatgtttcctccccatgatggctgagatactaatccattgaaatgtggcgataattcttgtgagaaaattctatgagtctataagtttgaagaatttagaagtgtaagaggacaggggttcatttacttacaggccttcttccaagttaggttttattttccttttctcctagtctctggagtctcctctctccagacaccctggaaagccattcatggcctttcatatttaacataagagtatttaatactaacactaacatgtcgaaggaagatgtttaaagcatgtgaattagacttgatcatatatgtttcattggcacctgtttctctactttttggaataaaataaaaacgacaaaaacagctaagaattttggatagtgatgtgggtgggagggattggggcattcatcacaactgagttgtttaatttatagtaagtgggaacttttagagttgagagaagtttaattgtagtttagagtttcattattagacagtagtcttaaacaattcccaagaagctaaaatgtgggattaacattttactttcattgtaattcatatcctaaatataaatgttaatataaattataaagtttctgaatttcctttcataaaactgggttctttgggttcttagttattttggatgaaacaaggggagggctagttggaaatgatggaacatttaaccactgtcaccacagttagtcacaattggtacatgcagaattaataaagcagcttgccttgtttttatttcttgtgaggtcagatgacagtggatgatattgacttgggaagatggccagaagccactatttaccatgtacatatatcagagagccatttattaagtttgaggagattggatcttaagtacttaattagaatgacattaataattttaataaaatgttttgcattgagagaactattcactcagaaatagcaggggtgaacaaaatcatctccaaagaaatcatttaacatgaagttagtctaggattaccaaccaagagcatggcattctcccatgtatctgacttaaaagcaatacttgtctcttgccccatggtgccaggtggtctgccatgcttccctcttcgtggctgccaggattcccggtatagaggcaaatacaacctgtaaaggctcaaacgcttcatcaaaagccatgactataatccaaagctattaggtttaagcaacttatttggaaattatcaccttcaaataacatgtagggcaacctcagtagagatgaaatggacgaagcaggcatggaaactgcccttcctgccttaaatacagaatgccagatcacagctctgaataaaagttaagaccacattgggccagatcaggactaacactagatacacagctgagataaagttccagtgactttggcagtgtgaaagtcaggaccagtaggcacatatactgaaggcaatttaagctgtgtttcctgattaaagccagggactgaaaaatcactacctattcatgatgaaagactagaaaacttctgaagaccagacagagtttcagagtggtatagttactaatctactaaatactgcaaatatatagtatctgcaaatatatatataaggttgaaaactaggctcagaaatgagcattaaaaacttttccagatcaagggagtgctgtacccccaagctgaggtttcataggctaccatcatccaggcactcagtcttcccaagcaagttaattcccaccaaaaatgaacacagtcaaagattacaaaacctaagcagaagtccattatcaagaaacagtgtccacaagtgcaataaatataatttatacctgaggaactataaatagtagagcaattgggtaggggctcttaacagacagatattcaaaatgttaaggaaaataaaagaagaagtagacttcgtaaaataggaacagagggctaagaaataagaacaagtagatctgaaaaagaaacgagtaaaaagcctagaaatattagtgccaatttctatgggtcaatgatttcacaagtgaatagctaacagttatttcctgtggccttacttggcagagagaggtgggggaagcaacataggagcagaaacagttcctttctaagtctgacttataaaataggaacaataaagacaacagtttattgaacaggatggtttattgagctgtccagcactataagcaaatggcttacaaacattttcctactctttttgatgcttgagagagatactttgatagaagattattccaaaatataattacttggtcatttagttctctctttattatcataggaaactatggggaatttttttttctttagattgcaaactagttttaaaaagagcttgtaatgaacaatttaattagattggttttggcttgcctaaaagcttaagaaggtattaatattctaatcaaaagtcttgggaaagcattcttagaataaaaaaaggaaagaaaatcttcattcttatgctttaagaaccaggaaagctgtcaaaggatataaggtaactcttacaaaagcaattgtaaaataaacgtggtttggccacaatgagccaacacctatgtttgccacagacttagattcccacctcactcatggcaaatttattcagctgcttaagattattttttactcatacttcgaaagaacaacagcctggaatttttagacttttaatggcaatggaaggaacttacctatgataaacatttttctttactctcacgctttcttaacccatggctgttctgagtcaatgtttgccttgcattcaaaaaataatagtaaagattcaagtaaaacatattcattaagcactatttgaaagatataccaagtgctttaacattatctcactttattcctacaaagatcatgtgcaataaatatcactgttcatgtttcctacagatgaaaaaaaactgagggtcatgttcagagaaattggatgacttacccagagccacacagatttgtacgtggcaaaggaggattccatttcaagtctttcaaccccaaattcatcttcctttctctaaggggaaatggtgctatggaattcatgtaagccacagagcttggataaaaggaatagtaagaccaaaaataggaaaagtaggaagaggtggatcctcctatgtttttaatcagggttctatctacctgtaactcttctgggaaaagaagcaggatgtgactgaaacatagctgctttctagatctcacaaatctggcttttctagtcaatcacatctctctctccttcggcttctcaccaaaccagcatccgttcagcttcaaagaaaaaagagccctactgtttcccactcatttatcatcaatctaaagtaactgccaatcacaaaagtcccatctttatttctttccttagaaacaaatttctctagggaagcttatcagtagcagaagtgcagactgggaaatggcctatgtcaccctcccatctagaaatgcccagtgcacatccagatcccacacccccaagagcgttgtgcaatatctgttaatttatgagagctgtttcccatagatgatgctgcaggcattagtaaggagggcaaagttcaagtgatgacaccatctctactccacctggctggtttccaggtgccatctcctgatccctctccccacccccactgccctctcaccatccttcccccaaaccccacactccccaccaatctgggtcagtgataaacacagagtattccacatgcctctgatatgatgtaacattcgacacactaaagataatactgcctttaaggctcctgtccccctggctagacttaaactgtgtagaggaggagaactgtgactttattccccttgcatcctggacacccacacatggtaggtgttcagtgaatatgtgatgagttggtgaatacccactgaatgtgctatttgcattgctacttccttgtgcttccttccactgtttctatcgcctaaaattcttctccctttttcctccaccctcgagtaggaaaaaatttgtttctttattgggcagggagttctggtcattatacatttatgtaaaatgttcttctaattggcatattccatgctatgtccagattctttcaagcgaattctcattaaggtaataatacctcaccgaagtttccagggatgatcccctagctgttcaaagctaccttttatatattaaataccagtcaatatgaatcaatggtaactgaaaaaaaggctgatagcttgtgaaggagttggagtacaaaactatgcctataaattgatcctcacaaaggcagactttttcccacagaaattgtattatgaatgctagttatagtttgagactagttaataaaattctactcactccaaacataggattaatggaacccacatgagttgtgtgctgtcaaagtcgagtcaagaggagagagaaggagaagaaaatttcctccctgttctcatagctcagggcacccaagggattctagagcgtaaagtgtactcccttctattttttactgcccttattcccaagctgaaccaaatatttacctctgccctcattttcagttatggagttcactcaggcccttttcaaccttcgaggttccttaacctttacattattaattctttttctaagcaaaatccagctgatctctactagatggttaaaaggatagtaaataggtaaattaatccacattaagccacaaatgactgctagccctaaccctttaatgactaattaatttttaataaagaatatgtgtctatataaatgaatttatacttctaagttggcataagttcagaaaaaatagtaagatgaactggaaaatctacaaggtatagggaaatcctctgggtgaggaagaactagtcatacctccctaaaagcctagccctagtttctgttacattatttcttcttttcatcttctgttttctaaaccacaagtttctaaaagcaccaaggaattttctacctgtttatttcgttttgtttttgtttctgtttttttgtccaaggtgaggcccaagttgacactgagtattctctgtgaaactctgcaaggagcaacatgtgatttcacagaaattagtctcgatacactatattcatggctgtaagttctatgctgctcacccattcatttgtccattcagtcactcattcatgagacatttatcatctgcctcctggaacataccagggcctacaccagaaaacaaggaaacaagtaaacactagtaaactttaaacaggctctccccacaagcaactgacagaccagtggagaagacagatatgtcaacagatgattacaataaagtttcaaggccgggtgcggtggctcacgcctgtaattccaacattttgggaggccaaggcgggtggatcacccgaagtcaggagttcaagagcagcctggccaacatggcaaaaccccgtctctactaaaaataaaaaaattagctgggcatgatggtacacactggtagtcccagctactagggaagctgaggcatgagaatcacttgaacctgggaggtagagatcgcagtgagccaagatcgcaccactgcactccagcctgggcaatacagtgacactctgtctcagaaaaaaaaaaaaaaagtgtcaaacctacatccaaaatgtcaaagtgctcaaaaaagttgggaaggcttcaccaaagatgtgacatttagggtagataacacctgtttgtggatactaatgtcctggtgagtcaaagaagaaaaggatgtacattatataagctggatgcaaaaaggaacaataatgaggacatgcaaccaaaaacttacatagggagaacaactttacttactcagggaaggcaaagagaccacttaagaactccttcacatgtgttatgtcttaaaagctgactactggagttgtatcccttgcacagcatccctttgcaccaaagtgaacactactctaagaacatgtgttcagctctcctgaatgccaagcacaaccatgcttggcatggcagtggtgtcttatttctgctcctctttttccccagggcatgccattgcaagagaatgctcagccatgttcatctggggacctgctcctggtagagcaataggatctgtgtgcccagcaccactgcccacctagctgtcctggcctgtgcccaatgctgaccttcacctcagagtgtggctgtaccacattcggtgatgtcactctcactgaaccttcagcctccttcctgggacttcctgatggactgttatccagggcagaatgtgttgattttctaaatcacataaatgaatagcttgactgttgattatgtagaaaatcagagcaaatatttgcatggctttgtgcagcccattcttgagcatctgattctccccagaattctaaaaaacctgctgctttctcaagccctcagtaaagacatgctttcttgataatcctagccaaacctattcatttgacatctttgttacacaaatggttaaccacagagttaacttcagaaatggctggcaggtatgaaggttagaagattcatgcacttttgctagactgaattggaagttaaagagtaagtagttactgactgcagaggcctggaaaaccatggaaaaaatcctattcctcaaagtcgagccctacctcctacgcctcttaaatcaattgccacagtgaccaatttgtcagtcacctaaaggcagctatcctgaccacttaagggagaatacttataatctttatacctaagtaaagattgtgagaggaaagaaatggtttaaagaatatgaatgtgtcacacttctgaggttaatgataaatgaattggtcctgcttacctcaggaaaaactttcaagtctttctgaaaaactaatttaattcagtagtattttctaagatttaggttatgtttttaatcaatttggaaaccaagatttacttatagaaaaaaaggaaaaggacctagataggtttattcacatagaatcccaatttcacttctctggatgataccattttctacaaaagcaattatgttctaaaatttaagtgtgctttcttaggctttatcagttcacagtgtttccttaagaaatatgatccagtattttttcctaagactaaagttgagttactacgtttatgactgagaaatgaatgtttgttagtttgtttgtttacaataagaattttttctttaccattttatttttattttccccaggtgtatttgatatagtgtttgcaacaaattcgacccaggtgatcaaaatgattctcaactcttctactgaagatggtattaaaagaatccaagatgattgtcccaaagctggaaggcataattacatatttgtcatgattcctactttatacagtatcatctttgtggtgggaatatttggaaacagcttggtggtgatagtcatttacttttatatgaagctgaagactgtggccagtgtttttcttttgaatttagcactggctgacttatgctttttactgactttgccactatgggctgtctacacagctatggaataccgctggccctttggcaattacctatgtaagattgcttcagccagcgtcagtttcaacctgtacgctagtgtgtttctactcacgtgtctcagcattgatcgatacctggctattgttcacccaatgaagtcccgccttcgacgcacaatgcttgtagccaaagtcacctgcatcatcatttggctgctggcaggcttggccagtttgccagctataatccatcgaaatgtatttttcattgagaacaccaatattacagtttgtgctttccattatgagtcccaaaattcaaccctcccgatagggctgggcctgaccaaaaatatactgggtttcctgtttccttttctgatcattcttacaagttatactcttatttggaaggccctaaagaaggcttatgaaattcagaagaacaaaccaagaaatgatgatatttttaagataattatggcaattgtgcttttctttttcttttcctggattccccaccaaatattcacttttctggatgtattgattcaactaggcatcatacgtgactgtagaattgcagatattgtggacacggccatgcctatcaccatttgtatagcttattttaacaattgcctgaatcctcttttttatggctttctggggaaaaaatttaaaagatattttctccagcttctaaaatatattcccccaaaagccaaatcccactcaaacctttcaacaaaaatgagcacgctttcctaccgcccctcagataatgtaagctcatccaccaagaagcctgcaccatgttttgaggttgagtgacatgttcgaaacctgtccataaagtaattttgtgaaagaaggagcaagagaacattcctctgcagcacttcactaccaaatgagccttagctacttttcagaattgaaggagaaaatgcattatgtggactgaaccgacttttctaaagctctgaacaaaagcttttctttccttttgcaacaagacaaagcaaagccacattttgcattagacagatgacggctgctcgaagaacaatgtcagaaactcgatgaatgtgttgatttgagaaattttactgacagaaatgcaatctccctagcctgcttttgtcctgttattttttatttccacataaaggtatttagaatatattaaatcgttagaggagcaacaggagatgagagttccagattgttctgtccagtttccaaagggcagtaaagttttcgtgccggttttcagctattagcaactgtgctacacttgcacctggtactgcacattttgtacaaagatatgctaagcagtagtcgtcaagttgcagatctttttgtgaaattcaacctgtgtcttataggtttacactgccaaaacaatgcccgtaagatggcttatttgtataatggtgttactaaagtcacatataaaagttaaactacttgtaaaggtgctgcactggtcccaagtagtagtgtcttcctagtatattagtttgatttaatatctgagaagtgtatatagtttgtggtaaaaagattatatatcataaagtatgccttcctgtttaaaaaaagtatatattctacacatatatatatatgtatatctatatctctaaactgctgttaattgattaaaatctggcaaagttatatttactttaaaataaaataattttattgcaatgtatttatcttcattacttaaaatagatgctaatttattttaaaataagactaccttgaatgagtatgaatatatttttatttaaattttgatacaactgatagtttaatactattggttatagattttttatcctgacattgaaaagttaaagaaaaaacattttgttctactgcatgtcatggaataaacacatcgttttgaatttttcagtttttcacataacaaagaaaaaaattaactcttgctataatgctagaataatacattattttacaagtaatttaataacagaatttttctaattgtatacattatcattgtaggaaagttagaagatatagaataacataaaaataaaagtcatgtttagcttccccggtcaaaaatcattattttaacatttgggaactttattttctacttttttcattcattatacacacatatatgtgtcaatcctgatactgaagtcatgatgtgtatagtactttgtatacagatctttcacttaatgtcatagcatagtagtttcctacccaattaaatatttttctaaaacattttaatatttgtataatactacaaaatatggacatacgctgatatagttaactagtcaccaaattggaaaattgagctttttctgatttttttagtatcataaattacactgagatgagcattcaatatgtgaatctgagaaatttcccatactcctagaagtggtgcaactgaaatacacgtatgaacattttttaatagtctaactacctgttatcaaatatttcccagaaaacataacaatttacaataccaccaactaggtatgaatatatatcaccataacctcagaatggggtatttactaaattttttttttttcagacagggtctcactctgtcccccaggctggagtgcagtggtgtgatctcggctcactgcaacctcccactgctagattcaggcaatcctcccacctcagcctcctgaatagctgggactacaggcctgctccaccactcttggctaatattttttacttttttacagagatggaggtctcactatactccctaagctggtctcaaaactcctggcctcaagtgttcttcccaccttggcctcctaaaatgctggaattacaggcatgagccaccacacccagcctaaatttaagcagaaaagaaagatttaccgtaaggatccagctgccacatgcaagggccaggatgcaactgtgcctgaaaattgtacttttaacatttctgctcccatcggacagttgcttcattcttctatttaaaggatttcagtgcttctgaagttcatacagggcagaccgaagtgctcattctggtcaaataaactgtggccaaagggttggagttatgcgtaaaataattgatggttgctgtgggcaagggggtgtcatctcagagagaggccttggccactgggcagaatttccacaaagcagactatattaccttcacattcccaaatataaagtttttgtgaacaaatatggttccatatgccttatattatttatattatttttatattatttttaatttcattaatgtaatgccagccactcaccccaaaggtcttctactattttcacaaaggatcacctcaaaaaaataaattttaccttatcccaagtgatagcataaatatcctatataaaatccctccaggcctccaggtcagctttataactgtttttttttttttttcagtagttgaggattttttgtgtgtgtttgtttttgttgttgttttgttctgttctgttctgttctgttttgttttgttttgttttttgagacagagtctcgttctgttgcccagtctggagtgcagtagtgtgatctcagtccactgcaacctccgcctcccaggttcaagcgattttcctgcctcagcctcccaagtaactgggattacaggcacgcatcaccacacctggctaatttttgtatttttagtagagatgggttttcactaggttggccaggctggtcttaaactcctgacttcaggtgatctgcccgcctcagcctcccaaaatgctgggattacaggtgtgagccaccatgccctactcaatagtcattttaatccaagtgattgtaagcattttaaacttgctgaactatttcataggttatagttggcaagatttctgatagataattgtatttagatatcccctatatcatgtatttattaatggtgttaataacatgttccattcatcaaattatattgggattttaccccatctcacttgtgaaatagatgttactaaccttgatgattattctttctttttcagtgagatcaacataatcttggagttgagaccctacttacaaaatgttaggataggatgccattatgtattcttcatgaaaatatttacaggttaggtagactccttatttttggtacatttaaaaaatacatacagaaaagaatatttaccatagagatctaggtgcccaacagaatgcaaaagctacatttatattgaaatatatatttcaatatacacccatttacacccatttctgaggtgtaaatttcaatatacacaatattaaaatttacctcattctaagcttttggggaaaaaaaggctagtcatttctaatgctggctctttctcattgtggaaattcatctttttggacatcagttacatcatttttcaagtacggtgagttggcttggtgaaagaaggcttttatattttatattttattttattttattttattttattttattttattttattttatttttgagatggagtttcactcttgttgcccaggctggagtgcaatggcatgatctaggctcactgcaacctccacctcctgggttcaagcaattctcctgcttcagcctcccatgtagctgggattacaggtgcctgccaccacacccagctaactttttgtatttttagtagagagggtttcatcatattggccaggctggtctcgaactcctgacctcaggtgatccatctgcctcggcctcccaaagtgccgggattataggcgtgagccaccgcgcccagcgtgaaggcttctatttagttaataattcactcattcatggatttaataagtgttgtattgtttccctactctgtgctgggtaacaagtgctgtgtaacatatagcagcttagcatgtaggataaacttgttgctcagctgctgtgagcagtgtgaaggagagccaagtgagaagcagcttgattgcaaatcacagaaaggctctcagagttttgataccacaggtttttcagtttcataactctgtatactggtgcatttttttccaacaatatgtgccaatctaggaagcccaagaagagaaaatagattgaagcaggtcacaaaagtgtgaatgaagaaaacaagtttcaaggaatttcggatacttggtatgaagagtgagatatctgagggtaaagaaagtaaatcaagagtaagagagatacagagagactgagtggacaggaggctggaagcagtcacacactgcccccaaggccagggttcagacctcacaggagagatacatacagtcagggccccaggaccatgttggatccactggacccagaccaaccagaggaagagggaacccaaatattagagtgggaagcaagtcataaacagtagacagaatggtatggggcaagcccttaaccatatggattttatatagttcaggctgtatgactgtatattggagctaatcagagagtcaaattttccaaattcaaaatcttgactgagtcagttaacatatgacatctgtaactatatccagtcttgtctacttgtgtagtgaacactcatggaaccatctgaacagtgtccattctcccctcatcgcaggaatagttctgccccactcagggacagcaccacctcagaatgaaccattttcctacctaactccatccccaggccacagttaattggtccaggcttgaagtggaccaatcacagtttttcatgaggatttttcaaacaggcgctgatgaagagctggccccagtgttggcatttctgagacgtaagctcaacaccagccacatctctcaccacgtggaagaagctagtctgcaacagagtgaagtaaacagaaaaggcaagagagccctgaaggtgcttgagtccttgattctacctgcgtcttatgtccagctaaatccctgcccactcctctctaatcaagggaccagaatacagtgatctatagctaagatctgcaagtgtttcttcccgcttatgatcaataagaatttcccttttgtagtgtccagcacatcatccattggccacccagcagaagtgataccgtctacatcccaaaacttattggtccctatcttaataaggggtcacaagtgctaccccacttccatatgtctccttgtgagatggtaacagccaggacattcaatagtgtgtgttaagggggaagaggtgtggagatatagacgtaccaatagtgagagggggctgaggctactacactatctactattgcaaattattgtaaactgaagtctctccctgagatggcacaggggtaaaatacacttctgttgcatgagcaattataaaaaatatgatttagaccatgaaatcataagcagagagaggaaattagtgctcctcaccacttgagggcccaaatgcatggcttgcatgttgcctgggctctctttacctgacagtgacctgggagttctctgggtatcatagagccagtgagcacagcatccaaacctgccaaaatccaatggaaaaggccttcatttaccaagctaacacaacttacatgagaaattatataactgaagttgaaaagatgcatttcaacaatcaggaagagccagaattagaaatcagactgttttttttttccagaagctgagaataagagaagttagctttagtaatatttaattctaaatcattcctatactaggaagctttgtataataatcctttaagagtttaaagaccatgagatttacccttcaagcagtgtaataggaaaatatttatctatatgcacaagagatgtaaatttgatgaaaaaatgatgttaattttaaaactattaaaagccagtttgctattatgattattttgcttcaagtatccaaatgatgatgagccaaatatgcccctgagcccagttcttgattcattccacgtcctataaagattctttagaaaaattgaacaagatgagaaatagggatcctggctcaacctcccagtgagttgggatttatctcatggaactttttcccaagcttgatgaagttctgctgtgccatatggacatgtacagttgctaaatgataattttccaaaaataagcttcaattctccaaaatggcagatagaaagcagctggtgttactcaacagagataagccctcctagagctcaccacagagaggagagcatcatgtctgcagatgccacagcagatctgctgagaatcagccagcgccatgtgacacaagaacccacagatgcagattcgtcctgactggtggctttcttctggccattgctgttacagagaagtttctaagcagtactcaatgcacacaaaactaagtagaggctatataggcaattcttcaaataagcaatcattattctcagtaattcttgtagtaagtggatggtaggaggaaaaaaaaatacctttccactgatgatatcacctttatagctatttcttgagtctccctatcttttccaccttcttcaagaaatagtcccctattacaatttgcatgcccactcttgctgcagaatttgtataggggctcaactctcattattgccaactatatgatttggaccatggatgtgagaagacttcagcaaatcaatccatcacattcctctggctgcaatgagttgggcacataacctaaatgaacacaattatggtgaatttcctggttttgccaggagctatcagacaaaaagcttgttctttcccactctatagtggatgtgaggagttgttgtagccatttgtcactccaaaggagaggtggtgtttccagaagttgtcacagtgtgtacttataccataagtatggagccaacatagtgaaagactggacaaagaatggaaatgaatcaagtccttatgacatcattggagagttgactttttgtgctagaaatttgcactgtcctccagatctccctatcttaagcagttggggatgggttttctgtcaaaattatccacgagaatttaatcttctgcaaaattattatagttatcatttattgagttctgattataggacaggcatagaattctctgcttatatgcattatattatttaatcctcacaacacccagtcatgctatttctgttattatcctatgagacaaaaaaaaaaacacagattttacataatcagtccaatgtaacatgactggtaaatgttggtgttgacatttgaaatcaggcattctgactccagaatctgtgctcttatttgctaagctatgttgctttcctctgctcctcacctctcccctgaccccccaaaaatggcattacaaaatatgagtcatgtaggtactttccaatatattatccaagcctatttatccaaaatcaatacagtaatattttactttgtctgaaaccgatctcactggatttcaagatagaattttaatagtctttgtccttgaaaattgggctcactaatggaaagcactaattgaccttaaaaagcataacactggattttacatttattgtaatgtgattttggatgagcttatattgggtctagcaaataaacaggctacaactgttaactgtcatagtaattagttaaatgctctggtcctttctgcagccaggaatttagatagcacttactaaatgggaggggaaaggaaattcctaaatttattttcatatcaaagttttaacttcttacagcctaacagaatgatgttctttaaaatatatatgttttaaagaaactacattatattctgagaaaaatttccttttaaggtgtgcagtacaggtttggcaacagattttggtgaagaatagaactggaataattaaaagtatgacttatttcaactgtgcacagagacccagaggataaagatgttatgatcataccatgagtcctaaggacagttgtagcagcatcattgaaaactacctcaacatggatgctatttaagaccttgagaggtaaggagagagttgcaacagaaaagataaaaaatgcttactgcttcaccttttgcttctggctgcagaacaagtagaaaggagcaattacacccaaaacgttaaaaaaaaaaaaaaagcaattaggctaaaggctgaggaaatgatcataacatgatggaagttccagcagccaagatcaatcagaaagtagctatgtagcctatcatgataggaaagctgggcatagacatagatcagtgttttccaaccaagtgtgggccaggagtggtggctcacgcctgtaatcccagctactcatgaggctgaggcaggagaatcacttgaacctgttagatggaggttgcagttagccaagactgtgccactgcactccagcctgggcgacagaccaagactcagtctcaaaaaaaaaaaaaaaaaaaaaaaaaccccaaaaatggaaaaccaaccaagtgtgattggccaaatccccaggggacatttggccatgtctggaatcacttttggttgtcgcaactgaaagaggagagtgccactggcacttagtaggtagaggccagggatgctgccaaacatcctgcaatgcacagaacagtcccacacaacaaagaactatctggtacaaaatatcaattgtgccaaggctgaggtccctggggtagatgaggaagggaagagcaccatgtgaatgctgcagtaaattgtgctaaataatgaagtgccagtctcccagttcttataacctctaaagtgtctctccctctctctttttcctgtgctcacactcactttctcagattgcattacatgtgaacttcatccaaatgacctaattcatggggaaattgtgttaaaaaaaattgggggggcaggcagtgtcatttctggggctaagtagacaagtctattaagcttctgcaaaaaaaaaaaaaaaagtttattcactcattaacgttaggaacaaaggcagctggtagcatgggataaacctaaagggttataacccacttccatgggagacaaaatgaaggtgtgggttccagtgggaaactaatcctcagagaagacactaagtgcagaaataaaacatgtaagcatgtggtgctgctggctgctccaccaggacactctacagtatcttagcatttgctatgagtctgatgaaaatttttattgaacaaaatcaaaggtgtattttatttttactctaaatatttccataggggatttgagtggctttcaatgaaaagcacattaaaacagggtaatataaaagaaaccagacagatgaatcacaaaaaggaagaagcaaaaccattgactgtacagacaaaaaggtgttgtgacagataagaatattgggttcacaacttcttgcagccaggttgaaaaggcatcactaaaactccagttctttttatcaaaacaagtgcagaacaggtccccatatggagcagtcttttcgacattgaattcctaaggaaatttctcacgttggactgtggatagagacatagagtcacagagggatcgtttttaagcatcattttttatttcagcctgattcttagttggttgttctcggaatgttcttcttaaaacccaagagcatgacaccaattcaatgaagcttggtgatgtaagggtatccagcactgtgagataagagtcacccaatggtgtacttgacaggcacagcaatgtccttatgatgtcaatggggacctctgggtccactgaaaccttagataagataggcttagactccctgaaacagtgcaagatctccagaaatttccacagaagcctgaggagcttatgtgttcgtggtctcctttagtttttgccatctgcctttccagttcagtttagagattatgatctcactactccacactgtaagatgccatattattccatggctgtaagatgccgtattccatgtgaaacagctccaattacacacacacacacacacacacacacacacacactcaacagcacactaacatgctatgtcattagggattacctttgattcaaaaagtcctttgtcccttggaacatttctcctctggactccatgcagtcccagacttcactccatctcacagatcattcccttccttctctgcatcctttccttttttatcaccaactcccttgaagaagtaaatccactttgtatttcctcacccctagcaccctagccattcgtctcattaactactcccttctgaatgtcacacatcctttctttcctgcaaagtttcctcttc

SEQ ID NO: 666 - DNA, 259202 bp, Homo sapiens
caactccagtttgaccattgctagcttggaaatatgggcaaattatttatctctgtgcctcagttgccttatctatgaaaggagacatggtaagagtacctacctcagagttgtttgaaggattaaagggttcttatgtaatgggtttatttaaaattttcaggatgcgatctcacccatggttgctctttatcgttgctatcattgctattattattattacgggagatgttgcagccattgggaatgacaaaatctaggggatgactgtgtgagtgagtgccacatagaggagaggagaacactgttgttggagattaggtcaaggtgcagaaaggcaatcattgttggaaggttcatctatgtgcatactgaaatgaccaagtgtttaaaatcttagtaaaaaagaatgtttcttaggtaagaaagatctgtattagaaattaactatctgtggtcaacaaattgtaggaagggtcatcaaatactcttcatttgaaaccaagaattaggacatacatgttgaatatatataagaaagaatattctttactccatgactgatgagaaagattatgttgttttagcatatgagtggtgaacacaactgtttaaaattggtcataaatgttgtctaatagtgttcagaagtattgatttaaagagtatccatttaaagctaatgcagaattatgttttgtaagtattaaaatttatccgattttaatcactttttagttttgtgcttctagagaatatttcaagagcaacaaaagagacggcaacaagatgggaaaggaactgaaagagattgagccgccacatgagcaattcacaaaggtctgttctatttggtaacacaatacgttcttataaaatacaactcatgaacaaaaatagaagacagtctgcttgtttctgaatgtatggaaagacctttttttttgatcagtttgactttattaatatttgttccacagagctttacaggtatcctttaactgacttctaggatttatagtttttacttttttcaccaaacaacaaattcatttttataaaattcagttggccccgagagtttctttttttttttaattatcctttaagttctagggtatatatgcacaaagtgcaggtttgttacattgtatacatgtgccatgttagtgtgctgcacccgttaactcgtcatttacattaggtatatctcccaatgctatccctcccccgaccccacaacagtccccagagtgtgatgttccccttcctgtgtccatgtgatctcattgttcaattcccacctatgagtgagaacatgcggtgtttggttttcgtccttgcgatagtttgctgagaatgatggtttccagcttcatccatgtccctacaaaggacatgaactcatccttttttttggctgcatggtattccatggtgtatatatgccacattttcttaatccagtctatcattggtggacatttgggttggttccaagtggacagaccttttggttatacattataaattacttaccattttcactttgtattgttccagatttaacataattggtaagtgtatttttaggattcatgaatagttttgtgggagttatttaaaacaggaaaaggtaaattggaaattttacctggaaatataaatcttgtgtataaaattgatactttatgaatacattaatgaagatttcatattcagtttttaggagatcagcgacagatctttagtggaatgcaggaagtccataaatccttactggatgtcttttttacttgtcttgtttaaacagttttagttaaataggaagtaggcaagtgttgactactgagtatctcttttatttcctgctggaatgtaggagtgttttatggcatattccctttcaaaactattagtgactagtaatggttttacatgaaaatttgtaatcataagagatggttcagatgtataacagaatgtgaaagccagcagattattaacactttgtgaattgtgaattatctgctgtcatatagcatattagctaatcgttattggacaatgacctcttcttcatgtagatgtatattatttaggaaacaatgtaattttcttttgggaggtattctttttaataaccttgtgaaaagacatgctcatatgtcactcctctacactaactgagatgtgttaaataaactaggaaaagcgtttgaaaataaaattttcaagcaacttaaggatgatctgtacacaaacagttatttacatagaagtcacgagaagagaacatgttgctataatgttcctcagaaactatttattaattggtatgaacattaaactagaaaagttatcctgtcaatgttaatgctacatgttaccccttagggtagaaactttggtatcatcttggactcctctgagtccattatccttcccatgcagttattgcgaggcacgtttaccgctgtaatggtcctttaatttctttctttaaatccctactgaggctgccctagttcaagacctcattcttccttgcttgtattattaagctcttttctgagttatctcttctcttctgagccatccttcactgatgggcaatactatcttcctaacactctcccctttctaaaatgcttcctagcccttccctcttcccagcctgtcagtggtgcccatgtctcagttcttagatattcagagactctcccctttacatgaccccctcttaggcttgttttgccaccctctgtctttcctcccaactctccagattgacagccttccctgaaggaactcaccgttactcccatgctttgctcatgcccttccctccaaatgcttttaaaatctttctttttcttttttctttttttttttttgactgattgaaatcttgtgccaactaagtcgacatcagtctccatttttggctacatgtccgagtgagttgctcttccatagcagtaacacaagttttgtattacttttttttttattcgtgcatttgctcatgtcacaggaatacggaagagattgtgtactcattttttacgtcttcctcagtattaacatacaacattttagggactatgaactgctgaactatttgttgagggactagtatatgtttcatacgtagttatgttttccccaacttgattaggtcatatcacagaccattttatcccttcaatgaaaaccacgttatgtggactattagtgataacaaatggtcactacctggtgaaaaaatatggtattccatgatataagactgacagtctttttctgtctttggtccatcttgtctgtaacatgttcatcaagccattttattcaagcaaactacatgactgttggacctgctataataatatttcactgaaatctggaattaaaaaatttaagtatttggagctccatgtattgattacagtttttaaatttgaaataaataaccagcatcctttgaatattaaaagctgtttcctttgacatctaatttaccctgtttaaaacctgagatgtaaagtgatggtttgtcagtgaactagactttttgttttagagtattgaggacttggaagagtataatgaaagccctctttttggtgaagaaagtggtgaagaaagtcaacttaaaaaatacatcaccgtgttccaaaataaaattgtgtcggagaccataagtactgcatatttaatcttaaaaactcaggattgatgtaagcactggaatattttatttgtagaaatgtatattgcaattacttaaatttctttttttgagacaactgcagtaagagttggcacttattcagatgtctctttaaccactgttattctgatggctgatgaaaaaacttgaacctatgttatatgatacaagcataacttgagctacactaaaccacatgacagtatttagttaattctcgtataaattagtgtatctcctctatcattagtttgtttgttaaatgccagacctcgttactgtgatctgttgaatgaaccctagacagttctgtgagaaagcagcaattgcacagttatatacatggtcagttaaattttaacattaaagataatttagttttaggtttggcctctgtggatctgtatccgttccaaaactgtagaaagcacaggcatggaacagtacatttttctctaataaaagaagacaaaacttattttatctgtgcattctttgtatttattcattaggttaaagagacaattccaatgaaagtatgacttcaaaaaatagatatactctatggcctttcaaaattattaaacttaccttaacatctgtgttcttgaaaaaaattaaactactataaatgattgagacaactgagcaggatatataaatgtcagtgctgagccattggcttgtgggtatgtcatttccaaagacatcaaaatgccatttagtttgttttggtccaccattcaatgataccacccctcagcattgattcaaagtattttattaacatttatgtatgcttaacaattacttcacatctatggcaaggtaaattatgtagggtgctttgttttttaagtttagtatttgtggagtatgtggaagttagtttaagtatgcatgcatctaaaatcttgtatgatgaactctcttacctttcctttttaatgtgcagtttttgcacataacatacaaaatgttcatttggaaacactttagtaaatatgaaattcagaatatatttggaataagtcagttaaatgtattcttttgctgagtttctgaaattccattcatgaattgttcagaacacaataccctcattgggaggagaggagagacttactctcattttcccttgttcttttcattttaattggcccctatataccactcttatcttttcaaggttttccaagttaaagaaaaaaaaagttcattcagattctgtttttctgcctacagtcacttatacaggaataagtgaatccttatggggagcatttaattcttaaagcttgcattttcataaaggattttccttttacccaaagcatgtgttgatgtgtaagtctaagtactacttcaagtttctaagaagatccttatttgagatctctttcagtagttacagaggcaaaataagcactgcagaggtccatgtgagagttctattatacatactgggctatctgactattctacagtggaaggatgagaaagacaccacaaggtatttagtgatggaacagttgatttatttttatttttattctttttgagaaggagtctttctcactctgtcaccaggctggagtgcagtggcatgatcttggctcactgcaacctctgtctcccgagttcaagcgattctcctccctcagcctcccgagtagctgggactacaggcacacgccaccacacccagctaatttttgtatttttagtagagacggggtttcagcatgttggccaggatggtctcaatctcttgacctcgtgatctgcctgccttggcgtcccaaagtgctgggattacaggcatgagccaccgcgcccggccaaaagttgatatttatgtcaccccttagtacctcaaatgagtaactgtgtacttgaagtcactctggcagatattctgaagggaagaaagtttttgaccttaaaagttattaggagtgtgtgtgtgtgtgtgtgtgtgtgtgtgtataaatgtgtgtatatacgtatatatgtgtgtgtgtgtatgtatatatgcatatacatgtatgtatatagataatatgcatatatatatgcatatacgtatatgtgaatatatgcacacacacacacatatatatgactttgttttttagaattgtttttagttcacaacaaattgatctgaaggtctagagatttctcatttaccccctgttctgccaccatagcattccccactatccatgtaccccaccagagtggtgcctttgttgcactccatgaaattacattgacacatcattatcaccccaagtccatagattacttcagggttcactcttggttactttttgtgtgtgtgtgactattttcctcacatctcttgtgctatagcccctgttttattttttcattaagataacgtttaatttatatatttgtgaccatgaaattttaggttaggatatcagaaacaagtcgcactaaaacaaacgtaaagatacacttttctcaagaaaatggtaagacaggtaactttaatttacatacatatgcttgaaaaattgcagttagtgcttttaaattctagactgaagcacgtattttcttttattccataataaacacccgctttgaagaatggctgatatcaagagcatcatgtctcctaatattgtctcactcagcagctgaatgttaaaatgcaaagtaaaagcactaaatatatccttagagcagtgatgtactgaacaaaattcagaggtcatatgcaaagacagtgcccaagaaattttgcccacagaccagtggcaagtcctttatttcagcaactgaaactgaagagaaacagtcttttgcctccctgcctcttggagagggtttctcctgatagcagagggaaaggaccatctcatttccctgatgttaaaatttcatcttggagtcctaggcttatatctttgtgaagatatctaaattaaggtgatccagtcaaatcacaaaatacttgactcactccttaggaggagcttaagtctgccctgatttctgtgcatacacctgatttattgcactcagagtacaaaagctctgagatgtcaaattgagccaggccgcacattgcattcttatccaggtgaatcagggctctctcagtgctgctcacccaaagcacattgaaataatttttcttatttatttgtaaaacagtgatgatggtatctgtgtcagagggttactgtgtcacaggaaacaatgatggtgagaaggttagacatatggtacatgttgaataaatgttagctattagttaccaatatcttcatgatttttattgatatataatagttgtaaatatgtatggagtaaatgtgatattttgattcatgaatatgtaaagatcaaatcagagtagttgggatattcatcacctcaaacttttatcaattttttgtgttgagaacatcgcaaatgtcttctaggtattttgaaatacatgataactacagttattcgagtgtgctattgaaccctagaacttatttcttctctctaactgtatgtttgtatccattgtccagcatttctttatccccgtcaaccctgctactgtttccaccctctggtaaccaccgttctactcactacctccctgagatcagtgttgtccaggaatgaaaagcaagtaaatggtaaagacaggccgggtgtggtggcttacacctgtaatcccagcactttgggaggctgaggccggcagatcacctgaggccaagagttcgagaccagcctggccaacatggtgaaacctcatctctactaaaaatacacacaaaaaaaaaaaattagctgggcttggtggcgtgtgcctgtagtcccagtgactcagggaggctgaggcaggagaatcgcttgaacccaggaggtagaggttacagtgagccaagatcatgccactgcactccagcctgggcgacagagggagactccatctcaaaaaggaacaaaaaaataaaaaataaaaaagatgaactagttgatagttaataatcatgactggtctatttgtctgctacactttctttcctctatgtgtggcaagtgcctacttactcttttaagacttgtgtcaaagaccacctagttcttcaccttttctggaccctgttagttctcaaacaaaattgtgccccctttcctctcttttagtggttctgtacctctcaaaccctgtattgtggctgttatttactgaactgttaccctagagtgtaaaaactttatcatagtcctaattttatttttggaaactggtatgttcccagccatacaggaggtgcacaatacacacgtactaaataaagtaatggtcatttgaaagagtaaatggtgaatacacagcaattctccaatctttgtgtttatgcaaacacaagaattaactttattggcctaattcaaacgttatcttgaaatttattcaaagttcccattttccatgaattaaccagacattttttgttactagattttcactaattaaccagttaaatctcttttgtcttatatcattttaaaagagcatgtggaacaaattcaaacaacttaggtagttcacgtctgtttagctcactattttaaggagtgaagttcaccccgccatttgcctacttgcctcagtactcacacaacaattgcactgatgtcctgctaatgcgcattaaatcagatatccatacctggctttgaagtgtgccctattcaacaaacagctcacttggttgttatcttccatctagtataaagataaaatatgtgccagagaaagatgtcttatagagattttcgtgatgtactagttacccataaacaattaattactggggcagacattcctaccttttagaaggagaaggcttgttcataggagttgagagtgaagaaaattaattcttgttgaactgataaatgtcccttctagatagtttacattgccattaaagcataacgttgccattttttctttatctctcagctacttatttcttgcatgagctattctggcttttaaaatcatattttttggtcatttgccaagtgcttggctgttgggtacacatggaataaattatccagtaaaaaccatctcagatctttccagctatttttgatcaggtacacctgtaaatcttaaaaagcctataaagaaatacctaactagtacattggatacaagacacacaaatctcacataggacaatggtaactgaagttctgaatgttgactcaacttaggaaattgcagtccttagggggaaaatatccttaaacaaaggcttaaaattctactaggtggtcaccaccgtttatacacatatgtatttccctctttttatttgggaaactgatggtcgtatttccttttcagggtggaagaaggaattctccattaagagaagggaaggaaaatataggaaaaataaccactctttgaaagcatctattgtccaaatcatgaggaagagcttgtagttctgagtttcacaaacgtgatttagttgtttttctgtaggatcctgcgtggggtcacctgtttcacgatagctgtgtcctcagacccagtgtaggagaagggtaaaaaatgtgttacttcactagttcatacctctctgagcctctcttgaaactgctgcagggaaaatttctccatctttgttctgtcacttgcatatttggagcctttcctactgcccttgttatgctgctttgctttgttttacagcatgcattttttccattgccaatgtttgtttgtatttccagggtctagcacatgactgtgctcaaatatcaagtgaatgaatgaatgtatgaatgaatgaacatgactttcagatgtcctttatggcttttctcattgaagtatatgcttgttctttacctcttcaaaagaggtgcaactcattgagaatagggttgccaaatgttgcaaaaactaagcatagtcttacaaaactaaacatagctgagccatacaatctaacagttgcactccttggtaactacccaaatgaactgaaaacttacgtccacacaaaaacttgtatgccagtgtttaaccagctttatctatcattgcaaaaatttggaagcaactaatatatccttcaatgggtgagtgcataaataaattatggtacattcatacaatggaatactattcagaaattataagaaatgatctagcaagccacaaaatgatcaagaggaacttgaaatacatattgctaagtgaaagaagccaatctgaagaggctgcagcctgtatgattcctgctatatagatgacatctggggtctggaggactgtggccctcttctcacagctcctctagacagtgccccagtggggactctctgtggggacttcaaccccacatttcccttccacactgccctagcagaggtttccatgagggctatgcccctgcagcagacttctgcctggacatccaggtgtttccatacattctctaaaatctaggtggaggttcccaaactgcaattcttgacttctgtgtacccacgggaccaacaccacatgtaagctgccaaggcttggggcttgcaccaagcaacagcctgagctataccttggccccttgtagccacagctggagctgaagcagctggaactcagggcaccatgtcctaaggctgcatagagccggggggccctgggccaggcccaggaaaccatttttccctcctaggcctttgggcctgtgatgggaggggctgccgtgcaggtctctgacatgccctggagacattttccccattgtcttggtggttagcatttggctccttgttacttatgcaaatttctgcagccagcttgaatttctccccagaaaatgggtttttcttttctattgcatcatcaggctgcaaattttcgaaactcttatgctttgcttcctcttgaaggttttgctgcttagaagtttcttccaccagataccctaaatcatctttctcaagttcaaagtcccacagatctctagggcaggggcaaaatgctaccagtctgtttgctaaagcacagcaagagtcaactttatttcagttcccaacaaattcctcatctccatctaagaccacctcagcctaacttcactgtccatatcattatcagcattttggtcaaagccattcaacaagtctctaggaagtttcaaactttcaaactttctaagtttcaaagtttctgagccctctgtctctaggaagttccaaactttcccagattttcctgtcttcttctgagccctccaaatggctccaacctttgcctattactcagttccaaagttgcttccgcattttcgggtatccttatagcagcacccaactctactggtatcaatttattgtattagtgcattctcaccctgctataaggacataactgagactgggtaatttataaatgaaagaggtttaattgactcagtttcgcagggctggggaggcctcaggaaacttacaatcattgtggaaggggaagcaaacatgtcattcttcacatggcagcagcaaggagaattgcagagcgaagtgggggatgccccttataaaaccatcagctcgtgtgcgaactcactattacgagaacagcatgggggtaacagtccccatgattcaattacctcccactgggtccctcccaccacacatgggtattatattcccataactacaattcaagatgagatttgggtaaggacacagccaaaccatatcatgctctaacctctaccttacgctgtagtggaggaaatgtggtgcctatttcagggatgtgacagtaagagccagatacatgaactggcatgcccaaggtaacatagagttagagagggaggggaatgaaaaactaacaatttccaagctctaaatatgcactggcactggaagaagtacttttttttaatgatatgaaatatttatatcatatacctaatacgtgtcaacacacgatccattgggatagcattttgatttattcattttacaattgagagaactgaaaatcagagaattaacgcaaattctctcaaaatcacagaactggtaggtggcagggctgacattcaatgccaaattcaagttctttccaataagcgcagttctgtcttgagaggtgtggctaagagcagaacccagatgcctatgaggagaagctggaagtccttctttaaggtcactttgcctttgcaacatgagagatggttcagggctctcctatccaggaggtgtttgtaaaacagcggacatccatttgtgcaatgcatttagactctgccctcccagaagtctggatgatgggcaagaagcgctaaggctcatttctcatccaggcaatcatggggaatgagtgtaaacagcctcaattcacaggtgcacctgaatgtgggatatggcatcaatgtttaagcccttttaaatttcttcacttgcagagctcaataaagattacattactggaaaggaaaggaaatcacctgcactgaaatatgacatgagggtggaaaagaatctaaatgtctgctggggacaaagacctcctctggtgctgctacacacacaggcaaatttccagcctcatgggtgcaaaatggccatatccagtcccctactattcaggtggtttttagcccacacaaagttttataaaaagttaagtcctaatgcaaaatcttggaaagttcacatacatatctagagttccagcctcttgaggaaagtggaagagctggcaacactgggtcccacattcctcacatgtgccccaaggcagcataggcacccaaccctgggccactgtacccacttacattacctggtatgcctcagagtttgtgaacctaccctagcctaaaaggaaggtcctagcttattcaaagctttgaaaaaaatcctgctgagaaaagactgaaggaatgctttttggcaccatctcctgtttcattagccacagctgccttactatgtatttggaccaataaaattgactctcggagaaagcaaaccaatgaaattcataggcaatgaggagagctcaatgaaaaagtgaggggaaaatgatttaaaaagatacacttgggtggcagagtagggaagtggccctttagaaactgcatataatctgtgccaggatttctcagcctaggcactagcgatatttggggccagataacttttcagtggagaatagtcctgtgcttcgtaggatgtttagcagcattccctggcctttatctactagatgccagagcaccccaccactgttgtgaccacacacgatgtctctggacatcaccaaatgtcctccagggactaaacttactccagttgagaaccactggtctatgtataactcaacttagagagcagctatgaacccaaatcatgtaaatgtgaacaaaacattcacattttcccacttgtcacaatgctcaagttatactttatctcagtttctgttttaaacagaacaatgtaaaagtgtttacaaattatgaagcctttatgtatcacactgactttgggacacaatagcaattttctttaatttacgaagaaatgggagtctgcatataattatctttctaccaaatttctaggactacagatgggggaataagccaagtttcttgaggaaatagccttgtatttctttatatgaactgtttttttctccttgggtggggcaggatcaggtatggaacaccctctgatagtcaacagttgtatgaatggatgtttagcatttagagaagactcaggagacattgtggttctttccttttatttagaggactaaacatggtggatgaagagacttactggccagccctccatgggccagaatgaaaattcaggaagatatcataggaagacagtctagccagcaaatggaaccagtggaatgagctgcctcaaaacaaagcatcattcattgtggcttccatttggttgtattctgtcttgcacccctccactttgtgagaaaccaggtcaggagcagccctatgcaaaaagctaaggggtaagtctccagctgaaagctatactagtgagcctgggaactgctcctccagccccaatcaagccctaagatgactgcagccccatctttgcttggctgcaacttcacaggagcccctgaaccagaacacccaagctaagctattcacagaagctgttttacaagataaatgtttgttatttgaaaaataaaaataaaaagataagaaaagatgcccagttaaatgcaatgtggtatcctgaataggattctggaagagacaaataacattagtgtggaaactggtgaaatctgagtgaagtctatagttttgttgatagcaatgcaccaatgttggtttcttagctgtgataaatgtaccaaggtaatacatttatggtattaatgttaccataatagcattgaggttatgttattatgttaacagggcaaactgggtaaggggcataagggaactctatactatcttcataactctctgtaattctaaaattattccaaaattaaaaaaaaataagtcctttctcccaggcaccagatgtattcaagcaaaggttggaaactcacttatcaagcatgtgagaaaatggaggcctgtattgctcactgaagtgctccacagaactgaaagctcagtttagtgacaagaagggaggtgactcacaagccaggctgaaactagtgaaataatctcctatttgcatctccttgatctgaaagaaaacatgtgcctaagctgacatgaaacatctattatgtttgccattctggtggagcctgtttgctggaaagggagtggacagctaacaagatggaccagatttgtttttatggggctggtgattttttcataggtggcttattaggttgttgtaagattctaaatcttaggttctctaaatcctttttctgcttaagttatccagacagtatttttcatttgcattcatgaacaccgattatttgattagtacagaaatctatttttaagctccaatgcctattctgtaaaccaaaatattgtttttaaaataaaatataacatctctttacatatatatgtacatataaatgtgaattgagttatatgatctgtggatatcctgtaaaaaggtttagtaataccatattttgtcctttattaaaactaaaattcattatttcatctcattatttctcactttgagggcttttctttgtggctttcaagccacagacctcccaaaaaataaggcaagagaaagactgaaccagatattttatttccagtttggaacaggaggtttgttaaagaagtaacaatattattaatgacccctggcacttgggagccattcattgtgcctgtactccatgtttggtgctttctaatgattaatcccagcaacataagttaaattggcccagtaagtttacataggaaaacaggtgttacctgaggacaagtcaggctggacaaaggatccacttactgccattgccaccccgagtggaatgaattcaaaattgctccttctactttgagttgcctgcttcatattcaaagtctatcccaagaaatggaatggatagcagctctgatagaaaagaggaatagtaatctaggaaagcgaaaccagtgggaccaggaaagggaaaacagtgggaccaatgcaatgctctggtttaagagttaacctgggatgaatcccagagatttaggaagggagccaaaacagggatctcttccctattcttaagcaagtattctctgcccagggatgttgtaccatagaacatgatgactattcttggcttgggaatattatttacaatataatagttatctgtttaaatgtcatcttccatacactgatctatccatccacccatccaccctttgattgatcaataggtgagattctgagctaggtgctatgaacccagatgaatgaatgctatctctgcctttgaaaaattcaaaattcagtgctagagatagacatgtggaaacctaattaaagcaaaatgaggccgggcatggtggctcgtatctgtaatcccagcactttgggacaccgaggcaggtggatcccttgagctaagaagtttgagaccatcctgggcaacgtgctgaaatcctgtctgtactaaaaatacaaaaattagctgggcatggtggcacgtgcctgtagtcccagctactgggtggggtggggtggggtggggggctgaggcagggggatcgcctgagccttgggaggttgaggctgcagtgagctatgatcgtgtcactgcactccagccggagcgacagagtagtgtcactgcactccagcctgggcgacaaaaaaaaaaaaaaaagcaatatgaagaaatgcttcagtgaggagaagacatttactaggtgccaggacaaaagagagaagactgcttccagttctgcttgcaaaggctaatgtttgagttcaaccttaagggatgaagttatccctctctggggtctttgaattttggtgggggtttccaccagcttagtttaggacatccttcctttctgattaccctatcccttttaatgtttgattccttataatccaaccctttaccaactaagcattctattggtgaaaaagatgagaaaattgcaaattcaggagtggattgctagtttcttaagtgggaaccagggttcaagagaggggaaaataataattgtggaagaaaacaatctatatggaaaataatggaaaacgtattcaagcccaaactggtcccatcattcaggcaatgctggatacgtgtgtgtgtgtgtgtgtgtgtgtgtgtgtgtgtgtgtgtgtgcgcgtgtgtcatcttcaagaaatctttcataccctagattgttggttatttaaccaaactcatgttatcaaagtttttgcttattaacttatacttaacagttcttccactaactttaattgaaatagacaaaggcagataggaacagggtgattggttcacttttgttggtataagtcccagtgaattaaacactttctttttcctgctagcactttgtgggctaggatttccaaaatctctttccaaagtgtctatgtttccctggagaagaaaatgttttatggtattcttaagcaatagcgatgcctctccttagggctgaggctccccaaagtacttgtgaaatgtactaatccccacagtttacatgttgaagtggtggtgaaattatcaaaggtgtggtcagaaaataagaacattctgtgagtctctcactgctgtagagaaagtcgactcttggaggtcaccatgccttcagttaaacactaagaagaaacctattctgttttgtgtaaattattctggcagggtgattagttctaaaatttttctatatcatcttcaagaggagaaaaaaaacttctggatcctcgaacctcaaagcaagtggttttctattacagaaaaatcattaagatatttgatttgttgaacacgtctccttgttccgtcaaaacatgaggtagggaagctgatctcatggtttagatgccatagctttaaaggctcaactatggtttttccttaactaggtgttctttgtaatcactgcttgctgtaagaactgctaatgatcaaattatgccctagaaggatcttttacttgctttcatttttccacagtcaagttatatgattttttttaaagaagatttttttttcaaagctttcagcacatgtctcaaaggggcagctctgctgctgacttttcatgatctaggagctagtatgtccttccaggctcctgaatttgtatctttcattgaacagtccttaaatggaggacaatacttttagtttagtctaggtaggcactgtatttgtagagacaggagtttccaaatatcggggcagggaaaatggcttttgccaagtcatttttttaagctacatttcattcctggagtgtaaatgaaaggaagtaggcaggagaacaaaaatacaaaaatcatttttccctaataaatattctaggtggttaactcaagaaaattaaaacccaaattttgggagtcttatcattacttgttaaagtcttggaaatgcctagaatttcctgccagttgctcccatgaaaacagctctctctgattcagtacctgaaaagatgatgcaattaaatgaaactattatactacctatccttttcttatccattccatgtttttgattatcctttgagccattcaaaacaattccatatgctatggaaacactatatacataaatgtgctatgattgaatttttaatgtatctcatttaatttttcaaatatttattgtgctgtaggtatgtataaggcactgtgctagacgctaaagcaaataaaataagaatggtttcctctctatcacttgtctgcaatggcagaagatgacaatgttcttccgtataccagtagtttttaatctaaatccatctctatcctgctcccctccacctactcactgcaattcttccttgctccattttgtcagttgctcatcctccatgcaactcatcctgggatgagttatcaccccaaactcgggaaatgaacccttagttcaagccaatcccagtgatttatttctacttcccagtattgatttgggcactggcaggtgttgcaattctaggacatgagaagggaatattgctaacttctcagtcatcaaacaagatagtaatagtgaaagtaataacttgtaatgaagattgacttattaaagttacccatttaatgcataactcatgtgtctatagactgcatggtggcatcagttgtttaaaccagtcataaaaatattgacttttattttttgcttaatgccaccaaaggaactcatctcaccttgaaaaaatatttggtcacatatgcagtcatgtgccacataacaatgctttggtcaacaggccatatataagacagtggtctgaaaagattataatggaggtgcttcatacagctatactattttttatcttttatgcaatatttctactatgccttttctatgtttagatacatagatacctaccattgcattccaattacctacagtgttcagtacaggaacatgctgtataggtttatagcctaggagcagtaggctctaccatatcgcctaggtgtgtagtaggctatgccatctaggtttgtgtaagtatactctattaagttttgcacactgtcaaaatcatctaatgatgcatttctcagtatgaatctgtcattaagcaatgcatgactgtaatataagcactaaaacatctaagaataacaaaggtctgatccttaaaaagcacacaattactacatcatgaaattaaaataatgaagaaattgaaatgaacaggaatagtatagttgaacaactgcataaaaaataacaatgaattactataatattaatttcaaattaggggttggcaagctttttttctgtaaagatccagagaataaatacttttgatcttgtgggccataaggtctctgtcaaaactactcaactctgccactgtagcactaaagcagtcacaggcaatacagaaagaaatggacatggctgggttttaataaaaatataaaaacaggcaatggactggctatggcccatgagcttagtttgcccacatctatcttaagtgaaaacctgttaaactactcttccagagctttccatatgtaaagctctagtaacacccactagttgaatttttaagtaatcttgagggcttgattccaaatgacctaaaaaggctgattggttaaaaaatacactcagcattaaatttcaacgtatacgtatttgcttttattttgcccatggggaaaccaagaaaaaaggcaaaatgttcatgtttgaaggatgggatattcttcataattatcaagtttattttgggctatgatcccaaaagagaatatagtgcagtcttgaaatctttgaaaggtgccagaatatttcagaaactgcagtgacagaagttttggtcaagatgccaaagtcttgtgcaatagtggttgctgctccaacaagacatacgaatatgtataaatatgaccagttgagacaagaccttggatagaaaacgatattgtctgagaacataaaggaagtaatttgtgaataccatggtacaaagcacatggcttaaagaatcccacacctgcttggcaccaacatagcatcatatagtggcagcagacacttgagaactttacatggtaaaaaccctggggtgctaggaagagcatccaagaagaaaattacaaaataacctgcaggataatgtctttgtcattcttggcttttaccagagtgggtggatgaggcagcttctatctaaagggtcaccaaagtcaacttggacagatcatctccactgctctatcttttaatataattgatgcatctgtgttttctctgtctattgactaggaactactcgatgataggaactccttttgacatagtgttgaatcctctatcgcagctagaccttaaagccccacatatgtatctccttcaggttgcataacccttggtattatgaggaaagagctgtgaggccttgtaggaagccctctgggtgtcactccctcagtttggctctagagagagaaggcataagatactcaggtatggctctagccttaggttcatcaccatggccctatggaaaaagaagttcccgtccaccttatcaaggccctgagagccacagcaaagatcaactaatttttccatactgatatttttgttgcttcctttgtgattccctgttctctattccatataccttccaagactgtgttattgaatagtggtttataacctattaataaatcaagaaaattcagtggatcatgaaaacatattttgaaaatgaaagagaatcagatagaagaggataggagagaatattataaagaatatccaaatgtatctctgataaagataagctgtttggcttcatgcatttcctgggctgagatgtaaaatgtacttctcactgcagataggttgtggacaaaaaatctgcaacctgctgttctaagacaagtaaacaaataaaagtctgtggtgcattctgagaacaggctgcaaactaaatggatttcttcttttatatgaaatagatagtatctcatataaaatggctttgatagtaagatcagtagacaatagggagccttgggatttttgtttgctttttgtttttccaacaaaggagtagccactgtggttgaagtttcactctggtgattttacgtgtggtagatagaatagaggagaagccctgaattgaggaaagtaggtaggggttctatgactataattaaaatcaagcataatgatgcagtgacatagggttgaggggagatacaggacaaagtgatatggtgatggcaaaaatgacaatgatgatgatgatgatggtgatggataagttttatggagagtatataagatgtcaggaagtgatttaagctcattatggttattatttcatttaaatctcacatcaaccctatgagaccatcaatgaaagctggaaactgagcatgaagtgaaggagtaaggaagtgttgaggttgttttaaaatcattactggagacactggggacagtgggagaaaggtgatcgatgctctttagagatatggggaagagtgagagaaagagcttaatttaaaagcttattattaaataatatgcctgcacgcatccattcacatctcaaagatttgctgagggccacttgtgtattaggcagtacagatgatgttccagatcaaagaccaataagacgtagccctactccatgggaagtcaccatcctttgtgtgaagatcacagaaaaggtgattgtggacacacagaaggtacaatcagctccacagttcacagaatagagacctttgttgagggcctctgggcacagtggtctcattattccgtgatcatccctatttggtggtgtttgcttcccattggcatttctacctacagtggattttgtggattctgcaccaggtttcaaccttatttttacttacacaaaaggctttggcagacagttctagcacatcacctcttcaactgggcattgccagaaagaataacagaaataggacagttaaatttttctgtcaagggttgttatataaacacccaatctcaatttccttgcctaccaggttacttttattttctaaatcaacatttaaatcacaaactgaagacagctgcagtgttggcctagcaagaatgtaattttccttatttcattgagttgtgtacttggatttgacattgcctaagggataatggcgagggatcattttataaggaagccatataattgagcaattttgaggcattggggtactcttttatgagactcttctccatattttcttaaaccatcagctattcctcattccatgatactgttttcaaaatgcataaacaaagcctttctcaattgtgatatcagaaatgaactgatacaagaagaaaacagctctaaagaaaacacaaatatgcatttctgtcttatagaaccattcaactgtaaatattggtttacaatataataaggttaagccataatgcctacactaacgtgctatagtgattgtggcaggaataagttattttctttcattttaccttagatcaggcatcagcaaatttttcctgtaaagggccagatagtaaacttctgagacaatgtcacaactactcaactctgacattgagtgaaaacaggcatagacgaattgtaaatgaatgagcatggctgtgtttcagtaagactttatttacaaagacagatggtaagcttggtttggccatggttcagttgctaacccctgattttgaccatttgtattaaaatgttaccaaaataatattaattggacctaacatactacttgatatacaaaaagtgctctttggatgtgttttaaataagtgaaaagtttgtgtagaccattaggttttgcttaatttcttgactattttttacatttgtttcctggttctgtgactaagagttggccatttacaaactagatagtctgatccaagagcctatgccaagagtagccatttgaataatcagatagtccatgcttgcctccatggagtaattttgggctcacagggaaaatgattggttcctgatttcaaccactaaaaatgtctccagattctcaaaagcattttcaaaagtctctttttgaaccatgttaagtttagaaggggtaacaaattaagctcatcagctattttatcttattagttattcagtgtgtacatctccaggctaaatggatatacaggagggaggagccacaagatgcaagaagcctgggtccctgaataacggcctggaagagagtttgcccttctcaccccattgccaacctgcattagatagtgcttcagtaagaaatatacttttgtagtggtgttaaggcactgagtggttagcctaccccaacaaatacaagtatgtatctgtgagatacagtcttagaagtagaatggttgggccatttaaaatttagaaaaatgcaagaacccaaaagcaaatgcaataaaaagaaagataaatagctgggacttaattaaaccaaagagcttttgcacaccaaaaggaaaagtcagcagaataaacagacaacccacagagtgggacaaaatcttcacaatctatacaattgacaaagtacgaatatacagaatctacaacaaactcaaacacattagcaagaaaaaaacaaacaatcccatcaaaaagtgggctaaggacacgaatagaaaattctcaaaagcagatatacaaatggacaacaaacatataaaaaatgctcaacatcactaatgatcagggaaatgcaaatcaaaatcacaatgtgataccaccttactcctgcaagaatggccataatcaaaaaatcaaaaaataatagatgttggtgtggatgcggtgaacagggaacacttctacactgctggtgggaatgtaaactagtacagctgctatagaaaacagggtggagagtccttaaagaactaaaagtagaacttccatttgacccagtaatctcgctactgggcatttactcagaggaaaagaagtcattatacagaaaagatacttgcacacacatgtttacagccacacaattcgcaactgcaaaaatgtggaaccaacccaaatgcccatcactcaatgagtggataaagaaactgtggtatatatataagtatgatggaatactactcagccataagaaggaatgaattaatggcattaacagcgacctggatgggattggagactattattctaagtgaagtaactcaggaatggaaaactagacattgtatgttctcactaataggtgggagctaagctatgaggatgcaaaggcataagaatgacacaatagacttcagggactcagggagaaagggtgggaaaggggtgagggataaaaaactatgaattgtgttcagtgtatactgcttgggtgatggctgcaccaaaatctcacagatcaccactaaagaacttattcgtgtaaccaaataccacctgttcctaaaaaaccatggaaataataaataaataaatacaatttagacaaatgttgccaaattgccttgcaccctgttgcaacaatttacacctctaccaacagtgtatgagagtgtttgtttccccacgaagtgtatcatccaacttttggagccatgccactctgagagaaaaaaaaaatctccttggtgtttaggttgcatttctttaatgaatgtgagggagagcatcttttcaaatctatttataccacttgtatttttctgtgagccacctgtaatttgtctatattttagattttctttttatattaatttgtaataaagttttatgcaatagagaagttagcctttagtttgtcaaatgtgctataaagtttagttatttgcttatctgtcagagataattctatttttttaaaatgtagtgaaacttgttcctctctttgtttatgttttctgggtaggccttccctagtgtaaaaaaatatatatctacctatgttttctgctggtgcatcatttatagtttcattttttaatctttaaatctttcttccatatcaatttattattttcttaatgatgattgtctcattatctcaaatacaataataacccatctttttccctttacaaaaataccgtatttatcacgtaataaattttcatatgtattttggttcatttttaattcttcagttttgtgacacattttaataaatggacagggttaatctccattttatctctttatcagatttcccctgactaccttcacttaattattttcccagatgatgtttagattaatttagtaaaatcatcaaaaagaaaaattctgttggtactttattttggaatcacattcagcttatagataattaatgacaaaatttacagctttatattattgaattacttcctaatttcctttcttatccagttgagactctgtgttgtgggattagaatcattcctttggatactgtattagcttcctagtgctgctataactaatgacaagagacttagtgtcttaaacaactcaaatttatcatcttacagttctggaggccagaaatctgaaatgggtctcgctgggctaaaattgaggtgtcagcagagctttgttcctttctggaggccccttgggaagaatttgtccctttgacttttctagcttgtagaggccatctgcattccttggctcatggcccctttctccatctttgaagccggcaacattgcatctctctgaccatgcttccatagtcacatatctccctgattacagctgggagaatttctgcactttaaagtacccatgtgattagtttgagcccacctagacaatccaggataatctccctatctcaaggaccttaactcatcacgtttgcaaagttccttttggcctgtgaggtattatattcacaagttccagggatgtggatgtggccatcattgggggtccattattttgcctactacagatatattctcaactgccatgtccctcttcaccttcattgaattgaactagaaaagtcctaactcaaaagaggatatttggattaactaaggctggggaattaaaagtccgatatggtgtatttagcttaacagtgtttagataccaggatgtttatttttcatttaaaattcccagctactaacctcaaacggaccttttggcctgtcctgcaatcctgtgacattgctggcccgttagctgccctctcttccactcctctcctctttcctcaaacctccaggacctcttcgccatcctcacgcctagtggattaaattgcttcctattttgttggacgctgagacgcaatctggagtaaaatcccacgtgccctcccaccatcttctaactcacttgcatcagtgtccatataactaatgcccatctatcattatagtgtaaaagaaggtcaaaccctccacttgtgctctggatcccacccttgtggtctactctaggaaatcacccagtaatttcccaactcccccatcctcaattctttcctctctatggtaaattctggcagctgatgatcatgttataatagcattcatttgaaccctggaagcaccagactcacaggagagggttctacaaatagataaccacaaataaatccctatgatcatcctaatgtgacagagaacagaaatgtgagcttgactatgtgtccattttcattgtatcatgattttcattatatcctattaggtttggcatcatttctttaggctttaggtcctggctacagtatttattttcctgtgaaaattattcacacagtgaatctgaccctgttgagaacctccatttgaaggtttgcatggggatcaagtggccacatttagaccaaagctactgtcatagagcttgccaccagccacacattccaaggatctcagtaaatatttgatgtctatattcatatgcccaattcagtagcttcagaaaccctcatgcgatgcctgtttctttcaccagccacacaattccctctctcctctataaatgagaaaattatttgtaaatcattagttcctattttgacagaaaatatgaaaataactgctgtggcctgggaatatcttcaaacatttcgatagcacaaatctttctctggatgtgcggataaccacacagcctcagaaataattaatggagacagagcctctagtagacaagttttataaaattgtttttggtaaaggttatttgtttagtggactctttaacaagcaggaacaaagaaaaaaatcaactggatttaaaaacaaagccacagagagtatctgttccctgatatcttatctgatgtgcattcaaaccaagtttcaaaaacttttcaaagtcatcattctcttcactacaaattaagtttgctaacaatattgccatttttttttccttaggaatgaaaagaatgtctgtgcttattaaagggagacaaaactcttggcccgggccccacatgggccactttgtgagttatgttggagggagaacaggcctcatctccaccctacaaccaaaccaataccaggtaaggcaggagggcgtttctcaaggataagagcgacacggcctgacagtcactagtattcatttttcacaattgcctaagtgattttcttcttatttgagctgagggtctctatgtgtgagattagcatgaaaaaataaaacagggtggggatttcctcttggaaacaacatgctgtggttgtggtagtgaacaaaccgtgacaagaaagccaaaggtgcaaggcatatgccagtgaaatatgcatgtcttgtcagcccattggccttgtctatctctctcttctgaactctgtcataacctccaatggagtctcaggttctgcttcaagaaaaaacgtggccctaagactcactatccaaagaaaaactctggtcagtgtttttgtgctactctttctggtcaaagaactgagcctcctaccgcagaggcaagtcgcccaagctcacaggtgtgaggagtgacaggatgagttcacaagtcctagtctttagacctccaagccagcattctttctgttagccacagctgagccaagagaactgcaccactggcactgtgggtgacagaatgtgaatgtatgtgtgtacagcaaggtaggtcaacttcagcacatggggcctgataatttttgttgcagggggctgtcctatttattatagggtgttggtcagcatcctcagcctttacccactagatgctaggagcatccatcccctaagctgcaaaaaccaaaagtatatccagacattgccagatgtccccagggcatggggagcaaaatcaaccctgcttgagaaccacctatttgtgtgtatatgtgtatacatatatatgcacatatgttgtgtatatatatatgaactatttatgaataaatattcatgaagcatcccctcgacctcctccaaaagaaaacaaagtagaagagaagttttgcagataccaaaatcctccgtggaaatgttctagtttctagaagcttcctatccctcttctgctttcctttaagtttcaggcaccctgcccaatgttgcttttcatggcagatttactttatgtgtataacatcatagtttttcattctgcctcaaagtagctgtctgctacatactaatacaaattaaaaagtgcctttataggccaggtgcagtggctcacgcctgtaatcccagcacagcactttgggaggctgaggcaggcagatcacaaggtcaagggattgaggctatcctggccaacatggtgaaaccttgtctctactataaacacaaaaattagctgggcgtggtggtgtgcacctataatcccagctacttgggaggctgaggtaggagaatcacttgaacccaggaggtggaggttgcagtgagctgaggttgtgccactgcactccagcctggcaacagagcgagactccatctcaaaaaaaaaaaaaaagtgcctttatagacaacagtaaacatacagagacaaagttttatggattcaaggaattcaagtacatgtgtctcatctttactggaatcaggatctgtttaaaaaacaaacatcagccaatcaggtgtgcactggctccagtgcaacatacaacacaccagctgaaaaactggctaaaaaggagttaggttcggtaaaatccctgattctgagttggcatagggtcaaacgacaagtttaacagagtgttaaggcattcttttcaaatgggttattttgaaaccaaactgagatagacacagcttttcttctgaccctttaagatgaccttcctgaaaattatttttaattggttgttcagaatccatatagactgttgatatacacacagctttcctttgtaatgctccaagttgaccttccctttaaataaatgtattacctgacatgcaaattgtccctcttgaacatgtccttcaaatggacactaatgccagccaacaaccaagaagctgtagtttccttcctgtgtgaatattaggtgtgagaagagttcacagctcacggctttggcagagccaatatttgacttgcagtgttccccggcagaaaggcagaagaggccttacctttgggaatggtgatctgacagctcaggtcacagtcctgttgcaactgataaaaagccacttcctgcagccgggccctctccagctctgagagactctggatggggactgacctcagccgtacactgcggcctgacatgctgttccaggtgaaatcaccctgtaggccaaaaaaaaaaaaaaaaaaaaaatcaagagttacagagttcacttacctctcacaaatctcatcctctcttagtaataaagtcaagcaaaccacctttgtgttccaaaattgggtctcaattcccaaagtcaaatcctcttttagttcactgtggattttctcagttagttgcaaatgtcaaaatctcaagtatctgctgggtcacatgatcttatctcattatgcatataggcctgaggaaactatgtagaaagatactgtgagggtcctacttcctcctttttatgggaacacatgggaacttctaacttttgtgaaacactgtgctgctgctaattgccatcacacacatcagatatagggggatgagtgtgtatggagagcctaccatgtgccagcggctgcaccaagggcattttttaaaattggcaaataaaaatcgtacatattcatggggcacatggtgatatttctatacatatggttattagatatatatttctaataattagtaactaatctcaaacacttattatttctttggttgctaacattcaatatcctccttctagctatttgagatcatatattactgttaaccatagtcaagggctttttagttaatccctccaacaaccttatgaagtggttaacattttttacctatctcatgtaaaatttaataatataatctagtataatatatgagaatatattataatagtaaagtttatacttatgacatattatatgaatagtatagtaacatataccaatataatatagatgatgaaactgagtcttgaggaggttaagtaattctccccaaatcataaaacttataagatttggaataaggactcaagctaagaatgtagggctttaaactctatgctaatattgtaaccactgaggttctatttgtagcactctcatgagttattgtgaacacaataagcttagagttatgatcaacaggaagatgttcagtatttatagagacatttgatgctaaaatactccacatcaaagagtcaaagcaaagatttccacaatcctaaaagtgtactcatgtgtacacatgcacacccttgcaggccactgagggtaaatggctccaccctcaatgcagacagtaagaaagtgacgtccaaagaaaaagtactttacaatcctctgaaacccagtgtctccttactaaagacttcttgtgaatctcatgtatcaggcatgctgcaacagatttgaggaggcagctactgttgctcaatgatcaagaaagaaaagttctatcagggaaggagaggtactggcccacgcagggactcattgcaataaatggaacacttaacagaatcccataagacttcaccatcttaaagaagtcactcgcctggacgtggtggctcacacctgtaatcccagcactttgggaggctgaggtgggtggatcacctgaggtcaggagttcaagaccagcctggccaacatggcaaaagcccgtctctactaaaaatacaaaattagccaggcatggtggcgcatgcctgtagtcccagctacttgggaggccgaggcaggagaatcgcttgaacctgggagggggaggttgcagtgagccaagatcacaccactgcattccagcctgggcaacaagagcaaaactctgtcttaaaaacataaaaaagaagtcactcaccttaaagaagggagacagaaagactggtcccagcaacaaagtgccatagcactttgtttcacactggtgacaaattcctgtctagtgtattcattccaaaagtgaatggcatgatgttaattctttgatattttccctctttatctgggatttcattcactcatttaatacatgaatatattatactctggtaggggcagaaaatgaacggggtaagtaaaaggaatggtgtgtgaaataatgataactgctaggaaggagaaaaaggcaaagaaggggaagtagaagaaaggaatttgcagttttagagacagcagccaggaaagacctcactgagaaggcaaaatttgagcaagtgttaaagaagttatggcttttagtttctttgccttgacatgtatgaattatatccagtggataatgatgaagactagcaggaacccaggaggagctcagggagggtgatgcaggaggggatgtggggagaggagtgagtgagcaaatctagtcaaagtgaggaggctgcagtcacattcagtgaacagaagaaaattcttctggggccagtgtattttgaattttttctttcttttatgtttttggtataaccagactaagaaaaaataggacatatagacattatggttggggactcaggccttgggtgtacccctcactcacaccctctaagcttagagaactacaaggaacactattggggaattttttttattattattttctcccagatagaaagtccccagatgagtttataaattttagatatcaagcttaggtacctacgggagctgactgttatttgaagtgtcaaaacagaattacatacctattctttaaaagcaatcaaagatgtgacctccaatgggcttaattatctgtagtaggggtttgacaatctttttctgtaaagaccacatagaaaatatatcaggctttgtgagccatgtgatctctgttacaactactcaactctggcttggtgggatgaaagcagccacagataatttataaatcagcgagtgtggccatatgccaataaaactttatttacaaaaacagcaggctggttttggctggcgggctagagtttcccaacctgtgaactatagcttatgactgaaataaagtaattcctagaagggacattttgttcttatttactaagtcctcctggttaattaattcaaacaatatttaataagcacagatgagatgctaagctctgtggtaggcttgggactattaagatgacaacacagtcctcgtcctcagagttaaccttcaggtaggaagaacacaaacaatccataaaacacagagattgtggtactagaagtaagtactaaatgcaatgaatgcctaggagacaaggctttgttatctatctggaggatcaaggaaagctttatagagaaggtagtgtttcaatggaggcttgaaagttgagtaagagggggcagggttcgcccagtagcaatgcaactttagcagcaggtgcaaaggcaaatgagtttgagaaaacaggcttgttcagggaattacaaggctggaaggaggaaaagggcaagaggtgaagccaagcagaagtcagggccagattctgtagggctgtctctgttggcaatgcaaaccagattagattttcctccatagacgatggctagtcattcaggaactttgagctagagaggaacatgagcagatttgaaatatagggaagatgactggaaacaagtttcctaaggaattaaaggggagagcaagtcaaagatgtggagatgagaaaagactccgtgctaagtgggatgctgattccaatttgaacagacacgggagaaacttagaaccacatagatgctagagaataaactggatgcagtgaggggaagagaaggggtaatctaggatgactcttgagtttctagcttcagcaactgggcagacagtaacactaatcaccaagatggggaatggcagagggaattatgtttgcagggggagaaggaagatcacccagttttggacatggtgaaaatggtattttcttttgaaaaaacagaattaaaacattactaagtctggcaaaacagaacctggccaatttatatttttcttgagctttgattttgtactctcaattaaaacagttccaacacaatcaaataatatatgttttttcaaactgtttacaaatgactacagttagcataataaaaagtaaagtgcgatgcttcaagtttactttagtccattatatattgcagcccacggttcttaacttcttggatttttaaacttctttgttatatttggaattgttaaccaaaagagagatctgaggttattttgttatggcagacccagtgaccaagacaatatctgtattttttgtttccttatttttactttttaaatttctgtgggttcatagtaggtttatatatttatggggtacatgagatgttttgatacaggcaggcaatgcataataatcatcatggagaatggggtatctgtcccctcaagcatttatcctttgaattacaaaccatccaattccactctttaagttattttaaaaatgtacagttaagttattgttgactatagtcaccctgttgtgctatcaaatggtaggtcttattcattaattctaattattttttgtagccattaactatccccacctcccctgatcccccacactgcccttccaagcctgtggtaaccgtccttctactctctatccatgagttcaattgctttgatttttagaacccacaaataggtaagaacatgcgatgtttgtctttctgtgcctggcttacttcacttagcatgacaatctccagtttcatccatgttgttgcaaatgacaggatctcattcttttttatggctgaataatactccattgtgtatatgtaccacattttctttgtccattttttttcctgaagttccctaatgattctcccatgcagccagggttgagaaccactgagctcaaggcttgaatagattctagtttgagtgtgcatccacattgttcagttaggctataataagtgctatgtagtaagtctagaaaatccaagaagtcctccattgtcaaagaaagatacaaatctaccaagggaaagaaagctatttctatgacagtcataatagtaaggacgttactttctgaaactgagagtaagcatgaccctgctttcttttattaaacaaatgaagtgatgacataatccttattttttcactcaacaaaaaaattaacttgaacctgacactctcagaagccactcttagccactacaatattctggctggttgttgcaagcttgtgagttgcccctctgcccacattttgttctgtggaggtagagagaagtacagtaaggcgtaatcaggtggaaggtgtggttggtagaataatgtctcccctaaagatgtccatacccgaatcccaggaacctgtgagtatgttattttacatggtaaaagggactttgcagatgctattaatttcagattattgagatggggagattattctgaattatccaggcgagtgcaatgtcatcacaaggagagaggtagaggcagaagcgagacaaaaatgtgataatggaagcagaggtgggagagagaaagatttgaaagagcttggctgctagctttacagatggaaaaaggagccacaagacaagaaatgcacacagcttctagtgcaggaaaagccaaggattctctcctggagcctccagaaggaacatggcctttgattttagcccagtgaggcccacatgagacttatgtaagtttgtgttgtaagtttgtgataatttgttatggcagcaataggaaatgaattcaagagtaagggggagcattagaaaaggaagttggtggggtgaagggcatgctcgcagacacttaaaaaagtaggttttgaccttccatcagattcttatctccctgctacctgatgctaaggtgctgcttcatactacaggtaccatcaccaatgatttgtgctggagaggtcccaagactggaattctgaaatcacttttcccataaaatagaattatagaaaattacatatagtaaatactttacgctctgtgggtcttatggtctctgccacagttactcaacttttgccattgtagggcaaaaacagccatagaccctacataaacaaatattccaaaaattttatctatgacatgaaaagtcaaggctcatataattttatgtgtacaaaatatccttccttcaaatttttttcaactatttagaaatgtaaacataattcttagcttgcaagtcatacaaaaacgggcatcaggctgcttttggcccactggctgttgtttgccaacccctgatatggagattagggtcatgtagtgccctacacatatttgtgtagcatctacagccatattccagcaacccagtcctagggccttgcattatcagccatatacaacagctagattcaggagggcaagacccttgtctggcttattcattttgatgttctcggtatctaaggcagtacctggcacttaacagccactgaataaatatttgtcaatctagggactaatgaaccagccccatcatgagttaaataaattggaaacctaaccaacccatacaatgttgtatatatgtgggaaactgtattctggattcgaataaaccattaagagacagtcttttgaaatagcctgttgataagccaagaaaaacccatgccagtacatgaggggagaaaataaatgtgataataggtgacgcggggaagagttaatccgtgatacctatacccacccatcagacttcataggagcagtaagacatgaacacaaaggtcatagtctccctttgactctcatggcatggaccataaagtgataaacaagcacccaggaagggcaccaaagcctaccagcacagtctagaatatgtttctggtggtttctcaaggctcacatgcatggtccagaccagcatttttctttggtgactgtttatcttataaatgaatgactcatttgaaggctttctgaatctagtcttttgagtgatcatcatggaatttttttaaggattgaaaatggatgatttcaaatttgtttagattttataaatgtagatgaaattgaaattcatccaatgtctctggatagactaaagaccttggcagttgtaaaaacatctttctattctagggtactatgtgacagcattaataaagggcagcaatatgataaaatgatataggataatggtccttggtggggtaatgttgcccccagtgagcatttagcaatgtctgaagacatttttggttgttataactggggcagcgtttgatactggcagctagaagatagaggctagggatgctgctaagcaccttataatgcacaggactactgcccaaaatcaacaactatctggatcaacttgtctacagtgcagaagttgagaaaccttggtttagcataaataagtctgctgttaagcccagattacatataatctccttaaaatgatggtgctggaaatattaacaattatttatatattttgtttatcataaaaatatgtactatatattcgtttatatatcatgcattactatgtgtattttacatgtatttttctacgtattatacacataaacagaatcatagggcttattttaagctagtattaataagtacaaacactacaaacctaattaaaagaagcaaaccaaaaaaagtttgaaaacaatagagtcttgattaactggagaacaactcaccaaaagtgttaactaaagagatttccttcccaccagaagtatatgtctctatgtttagaaaaaaagaagcaaaagacaaactaaaacccaaacaatctaatatctatgctttattcagaaagtcattcttttgagctaagttgcacctttacagacttgattttcccatgaaataaaattgattgaaataattttggttttgttctacaccacattgttttattacatccttggggctagtctctaactgcagcatctctttaatctcatccaactgtaaactccccagggccaaacaaggggtgaggcagggctgttcaaaatgtggtttgtggacccaaggcatcggaatcacgtgggcagaatgatcattgttaaacacgtaggttcctttggctctaaggtagatttagagaattagagtcacagggaataggtcccaagcacctccattataaagcagcatccccagatgagtcttactttttgcataataaaagttgagtctcactggcatggtggtgaagacttggattcagatagatggcagttctttggtaagattcagaaaatctctgatcatcggttttctcattattaagatggagaaaagaacaagacttaactctcagtttgtagggataatatcagacaatacaaatgaatttcttgtggaaggcttataagctcccacaagacctgaataaatggaaatttaagttataattaatattaatcatcaccactctaaatttgcatcaccatctgatgtggtttggatgtttgtcccctccaaatctcatgttgaaatacaatcactaatgttggaggtggggcctggtgggaggtgtttgtgtcatgagggtggatccctcatgaatatcttggtgctgtccttgcaatagtgaattcttgctctgagttcatgtgagatatggttttttaaaagggcatggcacttcttccctctctctcttgcttctgctcttaccatgtgacaggctggttccctgttgccttccatcctgagtacaagttacccaagggcattactagaagctgagcagatgacaccaccatgcttcctgtatagcctgcagaactgtgaaccaattaaacctcttttcctttctttataaattacgcagtctcaggtatttttatggtgatacaagaaggacctaacacagcatcttaacttggaagtattagagacaccaaaaactcttaagaaatgtgtgctgaattacacagcaagttttacaaggtgataagagatagagaaggaggtagcacagggtgaggggaataggagtgctgcatgagctaccaggacagccttacagagaacatgatttttgcaccaacccttaaggaggtgagggaatgagccaggcaggttttgggagcccagcagcccaggcagagactggttgacataggtatagcatagcctggtggctaaaagcaaggggtggcaagctgggctgcctgagtttgagtcccagttttgccacttactagccagccatgtggctttttagcaagctacttacattccccatgccccattttcctcatctatgaaatggggatgatgacagggattttgctgatacaagctgactagccggggagccaagtactgcctactgattgttttcataaatcaagttttattgatttatgaaaaccacagccacactcattcattgttattttctgtggcagcctacaggccacaattgcagagttgagttgttgcaacagagactgcacagtccatgaagctgcccttccgtaaaggtaaccatctggccctttatggaaaaagtttgctgacccctggactggactaaaagtaaagacacatctatgattaggatctgccttttgccatcaccattttcctcctctcctaagattttgtctctgagaaacatcccagagagcctgtaaaaaaaaaaatcaaacaacataatttagcatattagaaaatatgcaaatgctagcatgaaatagaagtggttatctgcaaatggcctgttcacctgggttaccgataaactaaagaagtagaaatgaacattgtcaaacccagggctgggctaacaccatctaaaaaatcaaatgtcacttacatcttgtttccagtggaaagaacctttccagtggttagcatagaggggacatactggaagtcctcaagggcaaaaacgtcagagcaaaaggtcaatttcatttctgtgtagtcccagttgaattgtggacttttctaatggccatcaatttaattctcagttctaagcttctctcgagtcttggatgggaggaagaaggtaagatggcctgcacaaatctcagggttgcaaaaactggaaacactggcatgaattagaaatttcttaatgacagggccagcagctgatggttctacttgtctttctctaattaaatttagttcactgaaattagaacgacctccggagatagattagaccttgaagatactgctcacatttatagatggtccgctctctgctagttactgttctaagccttttatttatattatctcatttaattcttacaacaacctaaggactatgttaccatcattattcccatatttcagatgaagaaactgaggcacagaacttaagtaacttgccaagagcacacaccaattaagtggcagagttaggatttgaagccaggctttaggttctagaatttagactcataaccactatatgtatttcataacatttcatgataaaccaatccaaacctctaactttacaaatgagcaaagcagctgcagtggcataatgggatctgggacatcagggtcatgttcccctctttccaccaccaagccctttcattatgagacatacccttataataatgaaagccagacagtgtttaaaaattcagaggcttaaagtttcctcttttgtaaaagacagcacaagcacatccgatgtattattagccttatttaatatccaaactgttcccctaaacccatatttatcacagccacagcaactaaaatgttgcacccatattcaagaagttaagagggaaagataaaccactttaccctttcagacttcaaaacagcctgtgcccgaatcttttacagaaattagctcaattatgctgttctgttaatcatgacacaatcctttcctgcttgagtttgctcatttcaagctgccacatcattaatctaaaaataaggttctcataaatccatattgacacagacagtttttagctgtcacacatctcagacactgatcattccagttttcttcctaaatcacaagatggatgtgaaagaatcacaaaactttatcacaattattttctgaaaaagtagtgtaagtatagatatttatattgcttacccataaattataatcagccgcgtctttgctgtcctctctaatctaactgaactaagcttgcagtaggaagttgagtctgttttaaaaaaattatttttttggtaaaaaatgcatcctgaaatggcagatcatattgaatgtctgagaaatggcccagctggcatagctgtgactcccacgataccttttgttgccagagacctccgctactgtgaatcttgggaccaaaaatatgcaatcttttcatcggatcattgagaagttcctgtcctttcagaacagaggcaggctgtgtccctgagtaagtgcacaaatgagtgagtgcgtgtgtttgtatgcgtgtgtgcctgtgtgtgtgtgtgtgtgtgtgtgtgtgtgtgtgtgtgtgagagagagagagagagagagagggtgagagagagagagagttggggaggaggaaagaggggagggaagggacaaaaagaatgagagtattttgaagaaatatactcgagttagaaaaggattcctctaaaaaaaatcctcttttccacagggatctacaaacggtaattggattgtaactgtgcaaactgtccttattaggaatcaaccaaagaatgttggaagccactggtgaaacccctgagagcaagataaagcacataggatgccttctttgtttaggacaaattctcagttcttaaattatattttaaaactactgactccatttttctaacactagccacacacactaaaaagcaaaagttttcattctctttcacactgaagcataacacatgctctgtattttatcctctttgtgggacagcagtccttgagaagttgttcatttcctgaacagagggtgtggaggtcagagtgaatatacccacatggccatatctaagagggttcaggttggggtgggggttgggggtggcatccatgaagagcagagagaaaagggaagattaattccaatcgcgaattaccttgatctccatgcattccacatggcactgaaccaaatacaactcgaaaagacatctttgtttcccagtcaataggaagttatagttctctcatgggtctcaagtgaattccaacaaaagaatcactgtgattataatttacaaaccgggaaatgatttcatggaagatcttactgattcaaaattaaggactcggtatgcttttactaggattctgtgaaactaatcatgtaagccacacatagcctctgctgctgctgctgctaaggaaggaattttaaagcagtaaaatattccaggtggttttctttactagaatgattaaacttaaacagagattcagagtaaaatctacctgttactgcacatacctccaccaccactatcctaaaaactgatgttgaaaatacgcattattccagtagacagtcaacatggctcatactggatactcatcaatggaagttacatcctcatttaaagatatctaatatcttaatatcaatatatctaatatcttaatatattatttcacatgaaattgataaatatgtaattcattttttattattaggcaaatgatcctttagtttataaatagatgacagcaacatgtagttctgactgagcacttactaagtgtcaggcattgttttaggcattttatgggcactgacttatctaaccatcaaaataattcttagcagtaggttacattattatcctcatattacagatgaggaaacagaagcgcagaggagttaagtgacttgctcaaagattcacagctcataagtaatgcggctgtcatcccaaccactatgagcttacaaattaactggaagacaaaaccacagttcagagtcagtactagtaggagccatgttataagtatctaataaggaagagacagtgatgaaataagaatgtttacctaacactagagtggtctgttaaatcaattatttgatggagacatacactgtcaggtcaataaatgtttcgtaagaaggtgactaagtgaataatctcaaataatcccgagagacaacatcttgtgaaattcctagtctgttttaagagtggaagcaaggcaggccttaagaggaagtgcagaaataatggagaaggtgtgtatatttggtattctttggaaaatgcattcaaaccagaaaaacaaaacataaagataaggaatcctttttaagatttaaataacaactctttaagtaaaaccaataagagaccaaagagtcactgaaagagccttggaaataaatatcaggaagcaactaaaaggttccatctgtggaagagtttcgctaatcacaaaaagtgctgagagcacaatggtcatttttttcccatttaaccctccatatctaagcataccaagaaacaatttatagcctaagaatctatgccattaagcattcattccaccttcttcttggctcttattctggattatttctgtttatatcactggtgatattttgcacatttaaggcaaaaatatcatagaatcactgtcaaactttttgagtgaatacatttctgattacagtactcttttgcctaaaaccctttgatgtctcctccttagctccaggacaaagtccaaattccttagcctggtatccagtgcggtgtgcttttacttagatggaataaaatcaaatagccactacataatagtgaatgataacagtagaagtttactgagcatgtattaggtgctaagcacttcatgtgtgccatgtattcactgcctccaacaatttcattttatagaggaagtgatggaggcacagaaatggatggcgcacagtgaggaaaacactgactgctcatgaagcccgtagcccctttttcgtgggcattcagctagtctacatttcccagcctctcttgcagttaatagtggtcatatgactggagtctagctaatggaatgtcagaggaagtgacaagcttcatttctagccccagtccataaaaacctggagacagcatccaggcaacctgcatagccatgtgtggtagtcccaggagtggaccacatttttcagtgttctttgcctagtgtagtcccctgcccttcaagcccgcctggctctatgagttactttaaccaactgaatgtggcagaaggggatgccaagcccattctggacctgagacataagaaggcatggaaacttctgcttttgcattcataggacccttgagcccccatgacataggtgtagccactatgttgaagagaccacgtggagaggcaatatagccagcgtgaaaggtttagttgccccaatgtctcaacctaaatccagcccaccctacctccagctgaatgaaaggaagaagcagcccaggttcagaatcattgcttggagcacagctgtcccaccaattgtggccaatctaacagtatgaatgacaaatagacttatgttgtgaaatttggggatgtatctgatatagcagctgacctcactttcctgaacttcccatatgaacacagataataaatctaagcagcctgatctggagcccttgcgcttgaaactcctcctatacttctccccactgaacgacatcatgactcatttcgtcccttcctacattctcacttggaaacagagtagttgatcaactggatggtaaagtaaaaattgctctttatatattgttttgctgagcatgtagaaagtctttaatataaaagaagacaaatatatttctaatgacatccttcagattttgaataatatatagccaatggttagaaataggtaatgcttttatctttcaaaatcatgactgactcataaaatggcacagtgaaatttcatttagattatattcattactgataaaccttccattggtcctggtaaccttttttgagtgtagcatagagttcgcatgtaaggtcttaatattttttaagactatatataaaaatgcaaattgtgagagacattttagttcatctgctgccttacagtgctcagtgaaaatgtggtaccatcagtttaaccatcagactctatctttgtattgctcagaacttccaggggctaggtgataagccaatgtatattctctcattgctgccatttgcttccttaactgtagctgtccgtcctttccccattcctagcaccctgaccttggtctaattgctagcgtccttctgatgctactgtgacctatttgcacggagagaatgttttggatccttcagatctaaactctaccatcaaagcaaatctagtaactggaaagctatttaagaccatgaatctgaaacagtcaaaaccacaataaagaacaactaaaatttactgagtacttattgtctccatgaatacgctatcctctaggaggcaggcactagaattatctctattttgcagataagaaagttgaaacaaagagagcgtaaagcgtaaagagcttgccagaagtcacacaactggcaagtaaagagttggcactcaaacccaggcagtctgttttcaaatgcaataattttaacccctaggcaatatcacagcatgccagcaaccttttctttattcacttccttggaagacctataaacaaagtaagtatgacacagagcatccaacagagactggaaggcctctctgcaactgggagaattttggtaaatacatagatgacagctcagggctcaaagccctgtggaattgagacacagaaatatgcagaaacagaggcagggcaccaggatgaaacagagaaaagaaagccaatagatggggcaatgacctccaggaataaggagagggacaggtatttcatttaaagaaaaaaggaacagccatgttagaaaacctcctggatgccagatcctttacaagtagaactagccactctcagttttaggtaggggtgtaacaccatgaaagagatgttttaggaaagatgaatgaggccgagtggtgcagaactgataggaaggggataaagagaggaagcaaactgagtctacaatgtaaccggtaaacggaggctctacctgtggaatgaactgataagaagcgagtctaggcagcaataaaacaagctgactctaggaattctttctttatgagagtccctctctttttccaataaatatggatccccagaaaattaagcccaagattatagctggagaaatacctttgagtacagagtgtgaaatttgcatctcattttaggtgcccaggagggttgacctagagaaaagcattttatcttgattcttatggagaaatctgtatatcgctggttctaccacactgcagagaatggtacttattttgtagctgctccttctactcatgtagtgaggaacgctgagttataaggttggatgcttcaggtttcttgaaataagaaggaaactcagataagagggcactcattctaggtaagatgtcatgtgaactctttgtagggcaggtcatttattctgttatgggtatattcactgctcattaaacatggaatggatttcagagcaagattacctaaaagatacagggatgctgaagtactgtcacctcaaactgaagaacccaatcccaagtcagatatttacaaatcagcaggatataaaacaagccttaaggatagaagaatatcgtatttaggagcttgaaaactcttaggccaaacaaactaggcaaaataaaaaatgccaaagtgaattcctttccactttctcatttcaatgctatatttggtgacattgtgtttcatcaattgcactttggcactttgcaaaagtctcttctcagtggggttcttctctaatgagaaaggaaaacaatttcctcaaaattacatgcgacttcataaacatattaagttaataaattaattttggatatcatcaaatatatagacgttgcttctaatctgttgcctaaaatgtgagctgtggacaatgagcctctcggttttactgtaagataatttatcctattaaactcttttaataagtaattcaaaatctacatgaattgttgtaccacttcattctaagtggggaaaagcaagttattcatttttagttgcagtctggtagttaactcatctaaatcttgtagagtaaatgagcaagcaagctgctttaaataaaaatatatgcggctacatttctaggctgcagaaaaagtctagcattaatgatattttcagaatcatcttccaaagcaaaatgacctcagatacaagtggtgatacattttagaacaaatgtattctccaaggaccaacagttctctaagttcattgcacattataattacttgctgtagttttcaaaaatttttatgaccatgtccctctccccaagaacagcatggtccaatagacttttctataacaatggacatttttgttaacagtactaattgctaaggtggctactagccacccgtggctaatgagcacttgagatatggccagagaaactgaatattgaattggtaattgtatttaatgttaattgattcaaatttaaattaccacaggtggatagtggctactgtattggacagcacaggtatagaccaagtcaattagactgtctggggttggggctcagacaatgatatatttataaagctttccccaaaattctaaggtgcagtccaggttgagaaccattgtaatggccagagcttaatgaaactatcagggaagacaaattccttgaactttttccaggatccataacttttctccaaattccactaagaatttgtcatgtacctttgcttccctccctcctgcctccactcctcatttcttgcacccttccacatactcatgtgatgactgcactctccatatattccttcattgactgattctgccagatttctcccacaccgagagcataacgtgccctcatctcaaagctcagattctttttttcctttctcttccattgacagcagaaagaaaacttaacaatgctaccaattaagagattaagtctccaagcacatacatccataatttaaaattgtttttcacgtgcacaggcttgatccagatgtcactttccatgagctctgccatagatgtgatggggaatattttgaacagtagcacagttaagcagctttcatcttatctgttcattttgccactgtttcattcaaatgggatgcagtgttatagcacagtggttacagggaggactctccttctggctgcctgtgtttgaattcaagttcagcatataactagccatgtgagtatccaacgcttttaagcctcaattacctgctctgtaaagtggagataaaatagtcctgtagggaggagagagctatgcatgtaacacttatgataaatgaacgtgtcacatgcgctgatagacccaggttttgattgctttttccctacacccctccccaaacctcaccctttttttttggtaaataaagcaaatagcggggccaacttttgaaggagaaagtcatgaaatccctaaaagcatgttccaagtatttgataaattaacgtggcaatatgaagaccattttgaaaacagttacaaaaaaatcaattatatggtaatctgatttttaaaaattattaaaaatttttattttaatgagtcatttttcttgacttccatgccaccagttaatattaataggatggacaaggaagggtatgctgtaaacatagctacattttatttcatttgtaaaaaaaaaaaaccagtagactcagaattccagaattcagtgatatgaacataaagaacatgatgtccaatgttcaagtacataatcgctttgttgaccttttggtaattttaactgttgtaccctaacaacatgttcccatgtcattttcactcatgggcattactgatttgtgcacgttcacattttctacacagagttttgctgcttctttcttgttaagtatccatctatgggtagattttttttttaacctcagaaactacaaaattacaacccattagcaacataaaaatttgtagtcaccacaactactaattagtggtgcacagtaaggattattcatcagtgactcacagcacagataaaataagctgagagctatgtcctggatctaaatccaaaagatttagatatgtggggaatgactatcatctcttgtacatatagtgtgtacccattattattccagtcccttatggtgtactcatggttttaatcattaaacaatcttaaaatgtgaggtttattaatatgcccattttatagatgaagaaatcaaagcacagggcagtcaagtaacttgtcccaggacacatattgcaagtggcatggctgaaattcaaactcagggaccttagtcctgagtttgtggtcttaaccactatcctatgctacttttctgcaccttgctctcctactcaagaaaattcatcaaaataactgtatgaggtggttctaggctcatctctaattctctctcatttagttttcttacaaatattctaaagtttgtaacttaattattataggtaataaattacttctaacacattgactgaggcatgccttgaccttgaggtggcaactgttgacttaaagcagggtcagcaaaggacagcctaaggcctatttttgtaatcaaattttattggaaaacaaccacacccactcatttacctattgtctgtggctgcttttccgatacaacagcaaagttgagtagttgcaacacagacagtatgatccgcaacacctaaaatgttttctatctgattctttacagaaaaagtttgccgaccccagatctggacccactgaaaagaaatcaccagatatatgacataggggatgacaatgttcacatttcatggtggagcatttcactatttcaaacagcaaaggaaccacattttttttctgtttctttttttaattaattttaagttccagggtacatgtgcaggatgtgcaggtttgttacataggtaaacatgtgacatggtggtttgctgtacctatcaacccatcacctaggtattaagcccagcatgtattagctatttatcctgatgctctccctcccccaaccccaccaccggacaggacccagtgtgtgttgctccccttcctgtgtccaggaaccacatgtttttaaaactatgtttgtgacatctctgtatgtatgagcagatgggtccacagagatcactcaatgtctaattttcttttacgcacataatgagaaaaagctcagggagaaaaagtgaaatcagtagcatggactttagtatttggtatgagctacttattaggaatcagcatttcttccaagtattctcgaaagaaaagacattcatactagagtgatgcctatcaaatccactatggccggcctgagaaacttgtaattaaaaactacaaacattatagatttgtctccatattaaatagatttaactatctctacatctatgtgtatctatatgtatctcttgactattatatatttattatatgatgaattatatatgtgacatatttctatcttatatagacaaatatttataataggtatgtgataatacacagtgggtaaagggtacgtatgcaaatgcatcttgctttaagtaaaccaattatttgaaaatacacacaataaaattaggggcaatgattctgtggttcaaatacatcagtatgggttccctgcagtgacccaggaaaactgaagcaaaatcatttttaacattgcttcctatgtctctcctactcacactcagaaagtcaccagtttctgtggatcccacctcattaaaaactgtcctttcctttaacacttcctctctgggaatgtccaccagcacttccacactcttgtaggctgtctctccctacaaagcaaaactcatcttgtcccttcccttttgaaagccatcattgaggctcctagctttccagatgaagttctcaactctgaggtgaaaacacaagatcgctcaagatctggccactgcttagctcttgggcttcaccaagcctcacttacttcacatcccttaatttcagccacatggaagagcccagaggacttcatggttagggtgaggggtgctctcagcccaaatggcttccccatgccttcctactcaccctgtaatgcttactgagcatcacctcctctgagaagccctgtcgtccccctacagggacattacaaatgaatcatcacattaacaagaaaatcataccatctaaaacacaaacaagtttactatggacctataaggaacaccaaaacatgaccaaaggaaattcaccttatgtttgttaaagaaggcgaatctgcttctttcaaggttccaaatgacctagacacttgagatgtctagacaatcacttgtgatgtctcattgagggaggaaagaggaggggtgggaatgtttaaatgtcagctatttttccagaaaactctaacgtcaccgatacgtccctcctatgtaaccatcacactcatctccccccgaccctgccccatctcagctattttcttgactcttatttaaacattggaaagctatttgattatctatatttgtgccttttctccctggctagactgtaggttctggaagaatagaaacagcactaacattttgtgcttttgtatatttgctggttgaaagaaaatttgaaggagagtagcaattctgtctatacagaaaatcatttctgtctattagcatggaaacaagaccagcagggaatatttatatttaggacatttattttaaagtagctaaaatcacttccagtaaaaatgcaaaaaaaagaaaatcttgcttcctgacttttagtattaagagacaaacatgtaaaagggaaaattgaaaagggagaaaccaacatgaagtatgacaccaaatgcaggtatgacgtgaaaacaagccatctgcacttactggttcacatctgattttctagctgccacttttcagatttatttttcaaaaatgttttctcctcaatatacgacttttaaaatgataaattacacagtatttcacagacctgtgtaaatacttttgctctgatgtatagaaaatcatgctttctctgagcaatgaagcatattgaaatttacattttcaaaaataaattatagtaaaataatagaagagcttggacataaaaatcatatgccataaaagttaccactttaaagtgtatagttctgtgtttctttttagtatactcatagatagtgtacaaccatcatcactgattccaaaacattttcatcacaccaaaaggaaagcccatacccagtcactccccattcccctctcaccccagcccctgggaaccactaatctactttctgtctctatggttttgcatgtttttgacatttaatataaaagtagaatcatataatatgtgggctttttgtgtctggtttctttcacttagcatgtttttggagttcatccacgttgtagcatgtgtcattacttcattcattcttatggcaggataatattcactgtatagatatactaaattttgcttgtccattcttcagttgatgggcatttgggttctttccacattttgactggtatgaataaagctgctgtgaatattcatacacactttgtgtgaacgtaggttttcaatgattttgggtatataactagaagtggaattgctggatcatatggtaactatgtagccaaaaacaaaaaaaaaaaacgtagacaacatgactccaaatagcaagattcaaacacttattttagtgcaaaacttgttttccgcctcattccattcacatgagatatcaacaattacaagaaaactcatgcaatgtttccacttcatatagatcagccatcagagctttttccaagctgtgataaggaacacaatccttcagtttcttttgctttttacagtctgatgaatatgagtgtcttgaaaaatttagaggtttctagtattctttttttttttaaaaaaaaattagccctgtaatggctataccacaaagagtagattaactaatttaatcatttatgtttatattttaactctaaagactaattgttgatatccagcatggcaattttacttgttaaagtacagttcagagtttagttcctttcagggagatattcttgcctatatcagaagagaagctaaaaagaatgctacacaaaatagatcaataggcttgctttaattactcttgtcctctttgattttattgcttactgggtgaggaaaagccagaagaatttaataccccttacaagatagtcattgcacatttcatgagttgctagggtcaaaagcagatgaacaaatgctgaacttcttcctggctctacagaacacgaccccacaccctccagggttgagaaatggaagaagccactaggataggtagtgcagaataatatctctcacccctaaggtttccacaccctgatttctggaacctgggaatgtgttaccttacatggcaaaagggactttgcccatatgattaagttaataaccttgagagggggacagaagtctagattatccaggtgggcccaacgtaaccacacaggcccttaaaataggacaacccctttcagcagaattcagagtttgaggaagatgtgactatagaataatgatctaagagatgtaatattgctggccttgaagctggaggaagggggccatgagctaaggagtgtgggtggttttagagcctccagaagaaatgcagctctgtcaacaccttgatttttgtccagtgcaacctgtgtcagatttctaacctacagcactttaagataataaatgtgtattgtttcatggcactaaatttatggtaatttgtcacagccatgatgacagattaattcaaaagaaatcagaatatttttatgcctgcaagggacacatacattatttaatgcaggattttccaagctgttccataatcaaatatatttgaaaaagttgtgcatggtagcttcaacttaagtagtcacaataaacaataagaataatagagaagtcctgcagaggggaaatcataactcggagtacctcctaaatacacttgctataatctcacctccttctattttttatttttttttaattttcagaccatctctccatatcactcgaattccccagaatatagttgggacatgctaaactaattccatctgctcagaacctgaggcacaatgggaagaagtgacaagccaaggtgcagcttggcaacacaaagacataaccctggactcatactctccatctggagtcccgtccaggatgccactctgtcttgctgtatctgcatcacagataatggcaataacaaagggatgcagccacagtgtgtttcttaaggttcagacctagcttaacatgatgacttgtttttctattgccagaatttatgaaagttagatctttggtgggagaagagggtatcaggtgaaaatcaacccaacaaagctcctaacagataaatttttctacttaataatatcaaaaacaatacagctgctttagcactgaatatattttattatttaagataaaagcattcaacacactattgaaagtttaataacttcatattaacaagagtaatacaataaaatatttccccacagtgatttatcctgttcctaaaaatgcctaattctgctgccaaagtctattttccacaaattctagtttccaaatgttaacttgagaaggaacagagagagacaaccaaatgccattgtcttccatcatagcacttaatgttttctccacatttccatttcccattgcctgtgttccaagagttatgagccccttgtcctttgatgttttttcagatatgcattatcctcatcctttttccaggatacacaatgggaccccttcttccacccctccatttttttttaataataataaagattatgactaataaacctaacaactttcgacacttatttttttgccaaagactatgccaagtgcatcacattaataatctcatttaatctcaacaacaaccaattgaggtaaatattactattaatatctatatttaacagatgagccaaatgaggcagagaacttaggtactttgtcctaggtcacataaaaagtggctgagccagaatctgaacataatctgatttagagctggggtcttctataagcactagcttagtagtcctctactggggtgattctgcccctcaagggacatttgccattgcctggagacatttttggttgtcacaactgaggaggaaagtgccagttgtgatgggtggagtccagggatgcttctcaacatcctacagtgcacagaacggcccccacagcaaagaatgatcccaccctaaatgtcaacagttccaaggttgggaaacactgctctaacctaatgtctcccaatgtcagctcattctgaatgggacattttttggtaagacatgcaaatggctctcacctccaggttagaatcttctttctctacttgggaaaggaggttatctcaatctggagtggatggtacttagagccacagagtccatttggtgtatattatcatagcatcaatgtactcaaaagtttaagctggcatcctgggacactaggtcattttatctttttgtccctcagtggatacatgaaagaggcactagctcactagagcgtgactgaaaagagccagaagattctggtttttgttagtcttgccttgtagtcaggaagacacaatagcagcgtctgtgtcacagataatggtaatagcaaaggggtgtatccacaataggttacttgaggtccagacctagcttaaaagtcaaaatatttaggccaggcatggtggctcacatctggaatcccagcactttgggaggctgagatgggaggactgcttgagtccaggatttcgaggctgcagtcaagacatgattgtaccactgcactccagcctgggcgacagagcaagaccttgtctcaaaaaaaaaaaaaaaaaaaatcaaaatttttttcggagcagttctgtgaataccatttgacccagcaattctaatatctactttatagcaatacttgcaaaatgtgcaagatacatttgcaaagacattcacttcagtacaatatctgatagcaaaaaaacccagtcaccaataaaaacaacggaaatgtgagcatatgttcaccaaaatatgtgtgctagaatgttcatagcagcattattcaaaacagccccgaactgtaaattatccaaatgttcgtgaaagtagactgaataaattgtggtatatcacataatggaaaactatgcagtaatgggaatgaaaaaacaaactccaaccacctacaacaatacagatgaatcccagagacatcacgttgagcgaaagaagtctgacataaaaaataacatgctgtaggataccagtaatgtaatctataaaaccagataaaaccaatatatgctacaaaaatacagaataggggttacctttggggagaagtgactggaagggagtccaagggatccctgtgaggtgctggtcagggatggttctccatctggcacaggtgtgttcactttgcagaaattcattaagttgtaaacttatgtgcacttctctacatgtgtattataatctaccaaaatatatatattaatacttatatataattaattttattatatattagttatatgcatatatgtttaaagaaacataaaaaacctaagtgtccatcagtgagcaactggctaactaaactacggggtatctattcagtggaattctgggcagtcatgaaaaaaagtggagtagttctctctgaataaatttggaaagatatccactatatgtaaagttaaacaaagaagttgcagaacacaagttatggacataaatgtttattataatttaacagggagatctggggttatatattctcaaatggttattagtggccatcactggaggatgggatttgtgggactttgacactgcctaatgaatttttatagtgttggaatttatttacatgtattatgtttgtactgaggggaaaaaaggacatttagaaaattaagatgaacaaaatatatcttaagtttgagattgttattatttcatcatccatgaagattagggtttctgatagatgaaggaaacgataatggaataaacagagtgtcttgccttcagggttgctaactgaacccattgatggaggtcactttggtttgttgctggcaatgttaacaattgcttcaaattagcacttctttgctgggttgctctacattcaaatccagttgtggtgtggccaccacaaacaagattcttggccacacaaagaatgtgtctacaaaatggtaaaacaactgaatttgtttaaattaacaaaaccatatactcagaggaaggaaaaatcaaaacagctacacccaaagtaattcactcggatgggtggttcatgaaatgcacccattcattaaatcaacatgttagcagcctcaagtggactctgtgagagactcaactgcaatgcaatattcctgaataaatcaagagaccataaaagacacttttttttggcccatcattagcaaacgttttctgagtgctcactgtggttctgccatcctgctaaaactctggggatgtgataccacctttataattgcaaatgtcattatgttgagtgttcttaattccaccaatgacattgaatggaaattagaaaaacatccactgattcaggcaaagttgataaaactacaacttctcatatacagtaaaggtctggcagatgtaacaatttataaggtagaataagttgtgttcaatggatctcaaccatggctacacattatatttgatcgaaacagaatttctggaggtggcacctggccatcgatatttataaaagcttccccaggggattcaaaaacatagcaagagttggagccaatgcttagaccaagtaaatcagaaactaggtagaatggaacccaggcaaaaatattatttaaaagctacacgaatggttcaaaaatatagtctatgttgagaaacactgcttctaaattgatgttataaatgaagccagaggcgacacttcagtaagcattatgtaaagagactcaataccacctgtccttatcttgtgcagttttgttagcaaattatcacaaggtagtattctaccatgttatggtttcagacgtttcatgtaaattatatctatatctccatgtgctctatttacaacatttcatttgattccaacaacaatcctatacagaatgtaatattatccccattttacacaggagggtaataaggcttgacagagattcagcatcaatccctcagtttcacaaagtcaagattccacagtctatatagtcatatcgtgctctatgtgcctgaaagcagtgtaccaatcaaagaatgttttctaagtatctattatgagctaaattctcttctaggcactgaggagatggagaataactataagatagggtcttctgtaggatacagcttacagtctagctgagaagctagtatcacatggccaagtttggaggattttgcaggaagatttctgaattggtaggagattggtcctgactggattccttccaagatttttctctatgacacaaattttgctggagaataaaggtaaaattatttgtgtaggaagcagaataatgccccccaaaatatgtccacatccaaatctcaagaatatgtgaatatgttatgctacctggcaaagaggagttaaagttgcagatgggattaatgttgctaatcatatgctgttaaaataaggagattgtcctgaattatgtatatgggactaatatcatcacaggagcaacttaaatgtggaacagggaggcagaagggtcagtgtcagagtgatgtgatatgagaaagactcaccaggccatttctggctttgaagatggaggaaggaaacatgagccaaggaatgtgggcagcctctagaaaatggaaaagtcaagaaaaatgattctcccctacagtcaccaggtaccatgattttagcccagtgagacccatttcagacttctgacctctggaagtgtaagataataaatttgtgttgttttaagcgactaagtttgtgattatttattatagcagcaacagggaaccaatacaatgtcttcccaatttttgaagagggaaatagaaggctcaaaaaggagaaattttgtagtttttacccaagctatcatatctgtagtcccaaatcttgatccctttctcaggcctactaaatgagaatctgcctttcaacaaggtcctggcctagtcatgtgatttctagcaagctcccaggtgctggtggtccccaacagttctccgatttaagcattaaagttcatcagaatcatggggaagcttgttaaaataacacagattgctgggccctaccccaaaagtttcagattcagtaggtgtgggagggggctgacaatgtgcatttctaacaagttcccaggtgataccaatgctgctggtccagccaccacattttgagagccattgctttagatgacactaataaacatgtaagaggaaagaagtggcacttatcattcaactaatatccatgataggacctcattattaactgacattttatagcaggtgagtgatctgtttaacagtctgtactttatgtacttgctctgtgaaaaaggcaccacatagccccagggttttgggcaacacttgtgggcaaaaatagccacatctttggaacaccaaagtatcaaatccatagatgtatttccccaaatcccaaaaacacattttcatgtgtatctatattttctccttgcagcattccatatggcacaactggcaactgtggatattgacatgctccacatctcataagacaacctgaggcactgggaatttccttgaacaagatttcccaacttcaatgctactgacatttggggttggataattctttatttggggggctttcctgtgcattgtagaatatttaacagcatctctggcctctacccactagatgccaggaacatccgtatcctccaattgtgacaaccaaaaatgcttccaaatattataaaatgtaccctgaagggcacaatcattcctggttgaggcccactagtttatctgattctcatgcatatttttatgtagatataatagatctggaaagagattattgagtcccacagcacaccttggacaggacataagattcctgagttgctgtttggtcagataatgaattcgagctgatccatatcatgttgagccttctgtaagctactgagtggggaacagatctttccagatgaacaaccacacagattgttttttttttttttttccaaacattttgctcttactcaattttacagccgatctgtgagacccaaactccctcagatgttctgtctattccccatcctaaatgtcaggatgggagaacaggttaaaggggaaaatcttaaaaatatgcatatttaaaattttaaaaacatctttggaacatgtattttaaaataaatgtaagtcagcttgagtttaagggcctcagtaatatccctgataaaaacaagagctacattctgtaattgctatagtccatgataaataaaaaggaaatatacattttgtacttacagagaagccactgtataatgacaacctacttgtaaacacaatctgggtttactaacttgcatctgataacaatgccatacacagggcatcaagtcctagagggtcaaggctgcgcagtctaaggcagtttgagagaacacttcctttaaactgagaacaacaaagataccagttattacctcaatcactttgtgattcccactctgagcaggacagatcctaagaactagaaaggaccacagtcatgatttctttagcccgtttatttacaaatggatttaccagggaggatgacagcttccttcacttacacaattctgaaaagaaaagaggtcacacttatattttctgaaatgtacatatttctaaagtccacaagcttcctctttttagtccattcctgagactaaattagattagtagggtatgatcaaattgtgattgcccacttgttttcgttagctacggtataaatcaaatttcatgcttccttttgctgctcaaggggtgtttatagtctgcagagtaatgttaaagctgacttaagtaaggctctttgagaaccattaattcttactgttgtaacataaaacagcccaaatccaaatttagacactttttgaattattgacaccatgattccagtcctttataaggaaggtaaagaccactggcatatactattgaattttattttaaaataacaatttctatcttttaaaatgtctttttatttccataggtttttggggaacaggtgatatttggttacatgaataagttctttagtggtgatttgtgagattttggtgcacccatcaccctctatcttttttagtgaccgaaaaaatgagtgtttttccccaccagctattgtttgaacaataacttcatctaaataacagttgtgcctcttgcccctagtcatctctttcctatttgctaaaatgaatcacagagttttggaacttggggtacaaactttggaccttcacagaccctgaaatagttgtctttccacaacagcaccctgggtccaggcacccacctcactttatacacccctacacccagctcagttcttaggtaactgtaaatctgtgggtttcaactaggggcgaatttgccccctcactcccccatcaaacatatgcgatgtccggagacacttttggttagtcacaacttaagagcgagggttgttgctgctaacacctagaaggtagaggccagggatgctgctaaacatccctcagcaaataattatctggccccaaatgccaagagtgctaacaccgacaaacctttttgtagaggttctcagagacacattttccaaccatatgttgtatgactctatttctatgaaatgtaccaaataagcaaatccatagacacaggaaatagattggtagttgtcttgtgctaaggggaggagaatgggaattcactgttactgggtatgggatttcttttcaggtgatgaaaatgttctagaactagactatggtgatggtggcaaactttgtaaatacattaaaaatatactaaaacccactcaagtgtaccctttcaacacatgaactttatagcatataattatgtattaagttattaaatccgtttttatagacctttcattaaatagcttttatttcttactaaacaagagcttatattgtagagcagttttgaatagctgtaggtttctctggagaatattctctggtaacagtttttgaatgcaaccctatatttcacaggaaaaacattatgttctgtatttttaaagacttatctatttccagttgttcttataatgttatcatttgatctggggccccaaggtatgcctcattcatctgtgagcaagtgggtgaagagtgtctgagccagggccagagcccaggggtcttgcgtctgctctgactctcaatgtgatgtgaagacagccaagtcatctgattgctttgtgtttctaccttctcattcttgacacaagtctgagcttccagacgaactttcttgtagaaaccctagcaagcaaggacagtggatacaaatgctcagtgctttgccactgcagaggggacacaagtggatttccctgtccaacattcagggtctctctgttcccaacagcccatctgccattgccctttttctacctaaaacctctgctgctgcctagctggtctttttctgcacaccaagcatgctctgcccattcccgtttctctttcttccaatgactcagccctgtgaggaaatagcctctatgtctatccaaatccttcacatctccaaagcctgaagcccctggcacacaatgaacaatagaattattttaggcaaggaattctacatttaattgctaagatcatggaagcatgagaagatgtcaccttttggccttcagctcctcttatgccctccaccttgcaccacaccagcagtgctgggttcctgccagctagctaacacactgggccacttccatgctggtgcctttgtgctgatcccagagatgctcaggcgaacacctcaccttcttcaagaaattgtttaaaactgaccaccctattgaaacgtgcaactcagcacgtctaatccttcttagctgctctactttttccttttccataggctttctcttctgctgtccttatttattatatccattgttcatagttgctttctgtgagactgtgagtaggagtctttgtgtgttttaatcactgatgtaaaacataaacccagaatatacccggcatgcgggaggtgaccaataaacatttaaacatgttaaatgcttagaaccatggctggcaataaaggttagtttcatcttcatcatagtcgtcatcatcaactttatcatcgtggggcaacacttacactattgttctgtaccattacaccgtgtttagccttttaatctatattttacataatgtataaaggctgtacattttttgagggccgatatcataccatatataatatgtgtccttttaaaaattaagatataattcacataccataagattcaccactttaaagtgtacaattgagtggcttttagtatattcacaagattgtgcaaccatcaccactgtctaactccagaacatttctatcatcacaaaaagaaacctggggctcattagcagtaactccccatttcccccttccctcaacccctggcaaccatgaatctactttctgtttctatggattttgcctattcttggcatttcctatacagtcatacagtatatggtattttatgactggcttccttcactgaatgtaatgttttcaaggttcatccatgttgctgtatggatcagtgcttcattccattttatggctgaacaatattttaaaaaactactaatctatgtatgtctccactgaacctcagcaggaaagttgaacttactttggtatattttacccaataaacaggaataaaaatgcttgtttttacattactgtcctacctcttttaacacagatgtaccattttcactcctgacagttaccagttaattataatccaaacaacacactcttcaactgcatataatttcccttgttgaaaattgttccacctgatatttagcaaatgcctacggacttttcaaattacaagctgtatgaactcttgctgtgaatgtttatattattaaaatatttcctactcatgatttaaaagggctctctcactttaaaaaatcgtgtgtttttttttgtcttggattttatgttgaaccttttttccccctaagaatgaacattggatatacccagggcctatgcaagtagcactatcacttactcatctctcttgctgaacatgagtgagaaatatcatactccaaacttctcgtatttcccctgcatttgttgcattcacagattatttaaaagaaataaatttaaacctcggctacccagagattttcaaggagtccctagataactactgtgttttggcgaatatctccccaaatggagagaagggagagcagggagggagggagaaaaaaattagagaaggggactttaaaaaatctatttttccacttaacaatgtatcaccaacatctttttatgttgacaaacgcagagtgacatcctcatcttgaatgctatttgtgccataatcgatttgaaccagccccgctattggtagacattttgttttaaatgttacttcataggccaggcgcagtggctcatgcctgtaatcccagcactttgggaggccgaggcaggcagatcatgaggtcaggagatggagaccatcctggacaacatggtgaaaccccgtctctactaaaaatataaaaataagctgggcatggtggcatgtgcctgtaatcccagctacttgggaggctgaggcaggagagtcacttaaacccgggaggcagagattgcagcgagccgagactgtaccacttcactccagcctgggcgacagagcgagactctgtctcaaaaacaacaacaaaaaattatctatcatagtgtatttgtttggagtatattataatttgaactaagaggtcagagccaaatgtaatgagactgttaggataatagattctagcgcttttacagcatctcccttttcagatacttatcagaggtcatttgcacagaagtccacaggagcagttgagagcaatgctgaattatccatcttagctattgaaaaggtccatctaaatcactgtaggatttctttcagaatccacattttctatgtttacaatgtcatggaaaacttttctacattttcattaattcatcaacacatttatctagcacctactttgtataagagctttttctaggtaccaaggagctcccaagaaagtataagacacaatacctgatttctaagggttgcggtggggtcaaagttacgatgtgtatcggaattcatcggtggttttgtgcctaagatctgaagatcatacaactccaactctaccccagcaaaaaaaaaaaaaaaaaagctatcctagagaatgatgttttcttgtaagtaaacatctacagagaaaatatttaaaagccagctttggctccagctacttaagaagactcactgttgaaattattccagaatattggataaccctggggatgctttaaaagaaggctcaagagttgaactcttacagatgataggaaaggctttgcaaactcataatacctgacttatccaaaggccaccctcataccccgagtgctgttgaaacccaggcagtaagccagtggagaggaaccccaaaacaaaccaaacaccctcccagcagtcaaaaataagtgtcacaaaaccgaaattcatttgcttttctcacaggcgaggccctcccaggccagccccacttagagtgttcctttactttcagttcacgcatacttttaacaagcttgggcatatgattttctagcatactgtaaattagaagcagcaaattagaagtggggaagttgctaacataagcattgtgagaacagcaaaacgtactgggctgcaagtcaagaaaaagaatacctactacaaaaaaatgagcaaaagaactattttatgcagtcaatttattcataaataaaataattgcttataggaaaaatatttcaattgaaatttcattttcctcaaaacatttaccaatttttaagctgtgtaagtggggcctaaattagtggaagagatttcaaacagagatccatattttaatgtcctatgattcaggatatgcagtaggggaaaatcaattatttctatggaatcggccatcaaagcttgttcaactgtccatggtgaattagcggtaactcactatccagtggtccagaggaattaatgccacattaaggcagcatcctgttgatcattatggccaaatatatcatcctctcattcttagaaggtgagaaaaagtataagatcaatctttctaaaactacaaggctactagtaattcatcattgacttcattagtagagattacccacaactttgtagaaaaaaaaaatatcctgaatcctttcagacactccaatatatgtaattatataaaatgggggaaaaagattgaaagtgaataaaatgtgatccacattttccttcctctcccttaccaccttgctgtacacccctgccaatcctcctaaggtccattttccaacttccttcaaagggaatccttcttgtctctgctataaaattcaccaataaatatattcataaataaagccaaatcctggggacatttggcttttagaatcatattctatgtttcttttcatgcatacattttacctgttataatcttctacttccttctttgcaatctctctctccctgattggaaggtcttacctttctttgcaatattcatccctactgatttatccccaaagatcatcttggaatcttgtttattagcattctttaaacatttactgtatgccagctgacagggttggggagagtaataaatagacttccatttccccagagatgtcactcatctacttttcacatgaattccctgagctaggttctgttattatttccattctacatatcaggaaattgaggctcagacaggctaagtaatttgtatatatacgtataaacatatgtatatatacaaactttataagtattacttgtgtattcaaagagatccaagtataacatcaactgtatctgggtagatattcagtatctcctttattgatctaatattgatggacgactcgtcagttagctcctgccactaattacaactttgctcaattagatcaatctaatcaaattccagaatgaaagaaaaagcccatgtgttataccaaggtagaggggtaaaacacacatgaatttaataggtagatgatcagaggttcttttagaaagtgaatagctttggtcattgcttagggaaaggggaggctgctgagaacatggaaacaaagtagctagccagacagttaagagactctgaaaaatagagaggaatttgggtttgcctgtatgagaaagtgggattgggccagaaggatatgggcaaagaagggccgccatactgagaggccaagctgctctgtgagatgggaggcaaaggacaacatcccctgtgacatgagtttgcttgtaaaaaacaaaatttactttaaaatgtgctgtctggtgtgcactccttgccttgtagtatagatcatcagtaaaagctttgctactgcaagaaccttaagttcctgattgtttttacggtagatgggtttcagcatggggccgagaaggggctttgtcccctgttttggtggacaccagaggggtgataaaggagtagccaaggggaacagagaaaaaataccttcaatggaagcagataatagagcagtggtgatcccaaaattataattcctcagagagaaactagagagagctttggggttttacccaaatgggaatttgaatcaatttctcctgatctgaaagggctggaaaaatcctggaggatatccagattacactagagaatctcaaccacctaccttgatttttgtaaagaacaacgttgtttgctagaactgaggaaaaggcgatggcagagaagctttttaaaaataaatctgaatatatcaacatgtacagtcaactaatttgctgacttcaaaatagcgtgatgaaactctttgcctgttaaacctattattgcccataatgaaagattccatatgcactaatcacaacatacagccttatgtctgatcatagcttctaaaaaatcatgatacagggatttttagttatactcaacacatttttcctttagaaactggattggttgttacagatgccatgaatgatataaattgagcttatagttggaagaaatctaaaggatcaagcatccctgagtttcaaacagaaacttgcactgaatacattcaaaggtatgtggattttatttataatttgatatcctttttattgtgcttatttctttctctgcatttcttttaaaagatataaatgtattctacatttctaatactatatgccatcaatagttactttttagttggcccataattaaattagactctgattactgaaatgatttttaactttataatgcaacaaagtgcttgtctaattccaaaggtctttcttggccacatttcacagtaaaatatttattttaattaattatcgattaaagtaaaaataatacattcacaggctgtgatctactactttgaaaagctttttatttaattacataaaatagaaccatccatgaagtgttttttctcattaacccaaacaaacaaacaaacaaaaaacaaatttaggagttagaaaactttagtgtacttttcatagacagcattatcacatgtaatattcacttcttatacaaaatttaaggtctttcttctgacagttttcccagtaatttgtgccacaaatcaatgtgcacattttaggaggacctgttttgcttaatgtcccaagggtcttatttatagaataattacagtgcaacatcaaacaaaatgaagattccattgaaagaaaatgaaacctcttagggagaaagtattcaaaattcattgaagaatcacataaaattcgtaccatcctctcctgttggttcagccacatcttttgctccacaatctggagctcagagatgttactggagggtcttgcctgaagttctgtagataggaatttctggaactaaaatctatcttggcaaattaatatattttctcaaatgattagtccttgtttttaacagtagcaatgtccaggtagactgtgcacgagacatttctgtgcctccttgttctaaaattataaaatactgtgcactttgatgatcttcccaacctttagagccaactttattcctttaatcattaattataaatacaatttagcttctatgactaagggctgtataggcataggaaaatggcatgcaaagtcatatgaagatagatcattcatgtccctgtaacttgtttagccctcaacctaaattaaatgcatctttatcactactgtgactccagaaacaatgaaataggctgagagctggaaatcacatatgactgaagtaaattcacaaacaatggctccatccttcttactagcaatagactaatgtagattatgtgtgttttatggagcattcattacatccatgtttcagaagagataagaaaagtggatgttgacttacatttcagaaccatcaagaaatggggacctggattttatttgcctgcctcctgggagcagcttttgccatgcctgtgagtaaaacaccccttgcataagtcagtgtccaatttcacaaacttggacataaaaatctgctcatagttggtgaaattagggtttaaaacagtatgagatcagatgtcttcatatgtctctgggttgaagaaacacttcaggagcttgttttaaaaaggtatattctcaaatgccgctaccaaaaattctgatttggtacagctggggcggggcccaggactctgcatttttataagcaccccaggagattctgttggaactgttagcttgtaaatatcaccacccatctctagatggaggaagcttttggaagggacccttgaaaggtctccagagaaagtgcttaaccagctttggacaaatattacagagatgccagttttgtctaaaacccaattcctctcaagattccaaatctcttcctgccctccacatattgctgctcttacccctcagggggtaagatttttgtgttaggaatccactttttgagccacattcctgttctcagaggccccacccctttgggtacatctgatgagtacgtgacttttttgtggttgcccgggatcctgcctacacccaatacatagtgatatattttatattcaaatgtattaaagatcaggacattagacccactctgtctggacacaggtgcataagggcagagaacttagatcacatgcatgccaagcaggctgcatctgctttttggtggaataaagagcagttgatacaaccagaagccagcaagcttgcacccttgcctcctctcttcctctctcacccacaaaaccaagattctgtgctctgacttcctgaaatcctgcattgcagcgattcctagtttcctcaggggtccctgccttacaaattcagcccttttcccactctctaagatggtattgttcaagagggtataggacctgactaaaaccattcacatccagatgagagagaataaaccttcccatgaaatgtgagcatttttaaagaatataatagagccaatcctaaatgaggccaatgtctgagggagattttctgcatgaccgtctctcctccctggaccccaggcacaaccagagttccacaatacaggcaccagacacttgggccccacttttgagaggacagacagtcctgattcagatcatcattcaggtggccttttatttttaacttgaaaatttttctgccataaaaccgttggcagaataataaaaaaagatcggcctaaacgtcataaatcaactctttcattttccatgggatttataatgtttccactttgctccacccatcttgttctggcattcatcaataattcccaccttgtggtttcttttgtggcttcttttgttgtatggaagtgttgtttactttgcatgtcaattatgagaaatccctttgatacttaaaagtacttgaccacctcctgatctacaagggaacattcgtgagacaattctctccttgttgatatttctttattgtgaaagagaaacacacttctctccccattatggggtgagttttatcagcaagtaaactgttgggcaggatagggtaggattcattgaaaacactgggcgtgggggtgggatgctgtccaaagatcactggagaataaatgtgtgctggtttctgcttccaggtctccagccataaggctataaccccaggaacagtcatttagctgttctgaacctctttaaaataaaaggtctcctcttctatacagcacatttgttcaaactaaaaacagacctcaagtatattctgcactatatagatttttttaaagtagcttcagtctcctttaatgtgaacaattgcatactgacttaatctcttcctctctcttctcttccttcactctctcccttcctctctctttctattctcctcccctcctccctgtaaaagctaccacctcatcctgggcaccctggttatatcaacttcagctatgaggtaatttttctctttactaattttgaccattgtttgcgttaacaatgccctgggctctgtaaagaatagtgtgttgattctttatcccagatgtttctcaagtggtcctgattttacagttcctaccaccagcttcccagtttaagctctgatggttggcctcaagcctgtgtcgtcccagcagcctcccgcctggccactctgactcagtctgtcctcctaaatatggccgtaagcttacccatcatgaaccactactcagggaggctccatgatagggcaaaaagtaaactctgaccagcttggttctaacccagctagtaaaatgtaaggattaggtaagatgttatttaaaactctttccagctcaaaaaactcctgattctaagatagtcacactctatgtgtgtctcttgcttgcctctgctgaaatattagtgactaagtggtataggagagactccgcagaacagcggaatgcatgagttttggacgtcgggtttgaggttctcctcaacctcttactaactttgtgattttgggcaaatcatttcctctttctggaaccctggtttcctcatctggagaaaggaaataattataataaccatatttcaaaatattgtttggagagtaatatagttaatgaatatgaaaagtgctttgtcaagtataatatgagcaaggttactgattattttttgtatcgattaaatgccgtattactatatgaagaatcctcaaacctaaggctaaccaagtatatatactgttcagaaaggaataagattcttacttctctcacaggttcaggtaacaatctatgagtttatttacttataaaagctgaagacaaatgttagtaagattttgaggcaagattttctgttgaaccgaaaagattgacacatctgatcagtcaatctgtgtttctaggatgagggacagtgtttgcacctctctttttcccattgtgacatcaaagaaaaaaatgaaattaacatcatgtcatattattatgtcataattttgtgtttgttttgctcttacaatgaaaagaaggaactatggaattaaacagatttactccctgtgtaacctcagtcaagttaatgaatctctttaactccccataaccttatctaaaaagtgagagtaataatacttgcctcctagcatataagaaaagatgaagaatgtgtgtgatggatgtaaacacagtgcctgtcacacaggaagcacccaacaaatttttaccttcttctttcttttgtagaactcacattctcaggctatcaatgttgacaggactgcattagtgagtctatatttcctactgcatcagtgagtttctatattggatgaaagtaaattaaatcaaatgggttctaatatctttttctcttaaggtgcttacccctttgaagtggtaccagagcataaggccaccggtatgtagacattttgttccttattccctgaaaatattaggcatgcattaaaattcccatattaagtgaaatatcatgtctactccacatgcagacattaatgggaaatttagtttgtaaaaaatcatatctgtgtacacagttacaaatttttgcaaaggaaaaatgaataaaatattcctatagccataatggcaaagaaaacactgctgcttctctggttggagtcacctgagccaatggtaaacctgcctctctgtttctcaccagtacccttcctatggttacgagcccatgggtggatggctgcaccaccaaatcatccccgtgctgtcccaacagcaccccccgactcacaccctgcagcctcatcaccacatcccagtggtgccagctcagcagcccgtgatcccccagcaaccaatgatgcccgttcctggccaacactccatgactccaatccaacaccaccagccaaacctccctccgcccgcccagcagccctaccagccccagcctgttcagccacagcctcaccagcccatgcagccccagccacctgtgcaccccatgcagcccctgccgccacagccacctctgcctccgatgttccccatgcagcccctgcctcccatgcttcctgatctgactctggaagcttggccatcaacagacaagaccaagcgggaggaagtggtgagtatattttgaagccactacaatgcaaatcctgtgaaaatggtgcagcaaaataggccccagagttctaaggtctccgacaaccaaggatctagagttgtagtagttacaggtctatgattctattagtccaagcaatatgctatacctttatgttaaagacaaattcctctaaatggcttggtaattaagaccacagtttttatggtaggtttcaattttactattactgaatttctaccagaatatgtattaccaaaacccattaatagaaatatatattactaaaccccatgaattttaagggcaacagtataagggaatatcagttctccttatatttcaaaggtttgactagcaagaataggctagagttgcactgaaggcttaagacaagagggagcggataattttgagagtgcaaatatctgaacaggctacaaaaggtagacgggaaatctcttcaaaaacctacaggaagattccccatttccagtagttttcaatctaacttggaggcggctaaactaaacatactgttagattccttttctgtactggggttctatagatgattaagcttttagcaagaagttactgcaatttagcactaaatcttccattacaggtagctcttacaaatgaatgggaatagtcaacaaaacaaacttaatctacatccataaagtcttacttctatgtatacgagattatgtgatcctatcatgtatatgtatccaactgtaattccaatttatacatgttattgatgatttgctactgagaagaagagagaagtgaggtggaaatgaccaggataagaagccaggacacaaaggttccaattctggctttgccctcaaagacgaggcagtattgtaaaagttacttcaaatgtatcggtgttttattttcttttaaatgggggaaaatgacgaaatcagattattttcaagtctctgtccaattataaataccatagtttctgaatttaaaaaaatcataatatatgtcataaatggcttcataattgtgagcatgtttacggaaaatatggggcagaattttttgaaaattgattgaatcccaagtaatcggtgcctatcattggctattctagtccaaggcacatgttctctctgtacatagaaaatgcatttacttctttatgaataattaataccatgaactttataatgtgctcacatcttgacaaagctatttatggaaaggtgactttgggcagatagtttgaactctttaaaactcagtttctttttgtgtaaaatttgagtataaacattgatagtttcttagagttgttttatggaaaacaaaatagcgtgataagcttggagcctgacatgcaagacgtaccccccaaaaaggtagcaattgttattttattataaaataataggctttaagtgtcctgaaggtggaagcagtcctcatggacacctaatatctaatgacaacgaaataacaaagaaacttcagaaattatagagttcaacttaaatggttgtacattgttttgacaaaactgaagccagacatgttattgtaaatggtactcactaggaacatttgtaaattattttaactgttcttttgcaatttttttcaggattaaaagatcagaagatgagaggggaatgaatacttcagatgctttcaggagtgacacaagaacacaatgatttttgcttataatcactttacttagcaaattctgtaactaaaaaagtaccattagcagacaataaaatgcattaaaaatcattcatgtctttgtgttgaatgaaacttaaattttcctatcatttgagatgatatattatgaatgagtattcttgaatcaggtaggaactgctcatttagtcatacaaattcaccatttggcaagcaaataaggaatatatttctttttagagaaaatttaaattatactgtctcaaatcttttttaaaaaacaaagtttatacatcagttaaaacagttgataaaatgaaaatttatgaatatgtacaataactaaaacctgaaccaaatgaagggaagtttatatgaaaaattctttacattaagaaagataaacttttgaagaatgtttatattatgaaacaaaataggacatggaacactggctttacacttcacaccacactggcaatcaaaatctggtcttttgatctcattctatggaaaaaagatttttaaatgaaattatgtgatatgcataataatgtactgaatttaaagttattcaagtaatttgttttcctcaaaaaatgttatcaatggagcttcaaatagagaattgcagtgattttaaacacaagtcatttctttcacctcataactttaagataaattgtactgtatagtcttcaaaatgttaacaaatgcataaaatggactcaaaacaagttttctttctcactcatatttatatttgaatccttttttcttcctacacccacacagaattgtaaacagtctttgcagggtttatattacacaaacccatggtaactttattccagtacctttatgattaaggccccttaatcattttctggaatgaataaacataactttattgggagggtgtcaatattcaaacaaataacttgattttaaagaatttagattcaattttttaaaggtagaaaagcttttaatcaattggcatggaccaattctaatcaattgagtcaatatttattaagcacactctagggcaaggcactattccatgtgctggtgaaaagagcaaggccccatccttaaggaatctagaatctaccaaaggggtaaaataagcccacaaataacaattaaaaaggccaaatggtattaatactatgacagaagtacagtcaaaacactctggcaaatatggcaaatatccttggctagctgtccaacagctttcctcaccactcctttcctgttggcagagctggaatcaatcccagcattcagccacggtttccaaatcaaaattcagatacgtagtgtgataatacagaggaatgtttcaaaccagagacatacattaactggtaattatactctaatacttgcactgtcaaatatggtagtcctgtcctatgtggctatttaaatgtaaataaattaaaattaaataaaacttaaaattcaattcctccgtcatagtagacacattttaagcgctaaatagccacatggggctagtggctaccattctggacaacacagatacagaatatttccatcaccattcagttttatcagacagcattgctctatgtactacttcttgaagttgaaaaataattcttattaattcaaatattttaaacaaaagatgaaacaaaacagatttgctggttgaaactgaaaatctcagctacccacagcaagttgttccccaagcatgccagtaatcctgatcctctatgagaattttctaagaactgtagaagtgccattctcttcctcaggccaaactttacatactaaaatggtttcccctctagctttcatttagaacagataaatccagagttcagaagatatttacattcttttctattttgtggttcaaactaatagtgcaacataacatagagggaggcacacattcacgttacacacactcacacacccataaccacgcatgctttctgggtttacctgtagtaaaaagacacatgtggagacatgtgccatttgagtaacttgaaattttaaataaaacttctttccattacaatcatttagagaatgattatgtggttatggtattcattatcaccaccaagacatactacagttcttccaatacaaaaatcatatcaagaaaaaaagatcaagctgtgcatttcatttccaagcaatgtcaagtttaccatcccctttctcaactccacacaaaataaaaatacagacttttctctaaatccgaagtttttcctttggtagtaaacaatagctgaaaataccaagactgagtttaaggccaagacttttaaaaagaaaataaattagtagacaactgtattaattgggaaaaaataacccaagagatcctagtatgaacagcttaacatgagactaacaagagaaaaacgacttcaaccaatttcctacatttccagaacatagtagcatttagtagtactccacattgctttaataaaatagtcatcagcttatgtctgttgtgaaattcttgttagttggagtttttacttatttttgtgatttggctttcaattccttttgcccctatttgatctggagccttaacagcaagggccataggccgacatttagatattaaaaaatacctccctgttgggaaaagtccatgctggcctcatttgaaacacctgactcttccagacgataaataattattgaggaataagattgggctgggagtggtgaggatttgaagagagaagaaaggagtggtcatttgggttcgaaacatttacctcaataaatcacacttgaatcctctatcacaaaatctaaattaataaagcccatttgcaaatatcattgtcctatggtcaacaaaaaacaccacaggacccagaattcactttactattaattttaaaaatgaacgatattaaaatctcaattcctccaaacagccaaattttgtttgcctctccaaataattttccatgcttcatatttggccatggaatgtgcaggctctgggggtgtcagttaagtgtccacagaagcacaaagccggctttccagtgtgatggtagggggtgcagcctccataaccaaaccgtttgattcacaatcatgaccattgcctatctgctgtggaaacttggacaatttttttggcctctctatggctcagtacactcgtctataaaatgtactaatatcatgctctgctctgagtcttttcatgttaatgagccccaagctcaataaatgttagctacagttcttgtaatcagaaagagagctttgtcctgcctctgtagactcccaaagagaacactacccagttggaagcaggagtgatacaaaattaggatatgacatggaagtttttgatgccacaggcactgaagtacatcacgtttgtctttttttttttgagacagagtcttgctctgtcacccaggctggagtgcagtggcatgatcttggctcactgcaacttccgcctcctgggttcaagtgatcctccagcctcagcctcccaagtagaggggattacaagagtgagccaccacacccagctaatttttgtatttttagtagaaacggggtttcaccatgttggccaggctggtcttgaactcctgacctcaagtgatctgcccacctcagcctcccaaagtgctaggattacaggtgtgagccaccatgcccggcccatgtctgtcatttatcagtgcatcactctgacagtgtagccacctgaacacctcccttactgattgtgaccctaaatgatctttgccttctcctacctgatatccccagacactgttctttgctgcctccaagacaagccttcatcctcaattcaccactctgagggtaacaggagagcaacaccaggcaagtgtcatgggggcgctccactaagtggaggctagaacttgagaccacctctctctgcatgtcttccttttaccttctttctagggctgagcctttgtgtacagtgactcccaactcagacccttcccttgtcactctggcattggcacaattcagctaattccacattataaggatttcatttttctttcttttacttttttttttttttttttttttttttttgagatggagtctcgctctgtcgccaggctggagtgcagtggctcaatctcggttcactgcaatcaccacctcccaaattcaagcgattcccctgcctcagcctcctgagtagctgggactacagccaggcaccaccatgcctggctaattttttttgtattttagtagagacagggttttaccatgttggccaggattgctcaatctcctgacctcctgatctgcctgcctcagccacccaaagtgctgggatcacaggcgcgagccactgcacccggcctttaccaaaccgttttcctctagatgagtggttcttaagcaggtacagttgtgtctcctaggggacctttggcaatgtctggagtcacaacagggatctaaacaaatcaaaacagcttggggagtggtaggggtgttaaggagaatttgcaaaataaagaaagtgctgtcccgtgattaagtcagctaatgtctctaaatcaaaactatcctgttaaaagcccagatttcaccactacacaatatatccatgtaagaaagcatgtccaccctctaaatctataaaataaaaaaagtaaattaaaacaaaatttttaaaaaccgtccgacagaagttagaatagttatttgcttcttcagaacttacttagaagtgagtatttgtttcttgggaggttacaagaagcttgtctcctgtgagttaattgttcctgcttgtttgaccttccaaagatgtgctaaggagctaattgtaaatcagactgaagaacctctgaaagtgattgtgtctacccgagtgataaagaggagaaaataataaatttagccatgagtgtaactactgaattcaaggttattcaattagtctgggataagttctgttctgagatttgcttggatctggcagaataatgagaaatgagtggttctgtccataaagtgggcagtaatttaagatgccttaattctcatgattttcagaaccaccactctccaaaagaatgattcttttgattaagaagtttttgttacaaaattgttacagaataaaacccctacagccatggagaatataaagcagtgtattgtaaggagagaagatgattaagcactgaccttgggcagctgagaatatctgacagacccaggccatcgaacaccctatctgtccaaataaccaactcaaggcacttctgaagtgaggatctccctgcctccttgctgctgtatcccaaacatccgggagcagccatcagtgaccctcacctcaatgccacctcttctagaaatcttctctcactgctctacgttggctggcactcctggaagtgaggttcccctgtctccttgcccccatatccacacatctgggagcagccatcaatgaccaacacctcaatgtcacctcttctagaaacctctctcgctagtccacagggctggagtgcacaggctcagaggtttcccaggatatgttgaccatgcctctatttcaaacaactgcttctttctacttttgtctcccccttagctgtcaagctccttgaggcagatttggaaaaatacctggaaactggtcagtatgcttaatatctgctcaatgagccatcattagcattaaacacccaggatgctgtcatataaaagtaatgataataataacactgaacatttactgggcttattatatttcaggcactattctaagcacatgacatgtattagctcatttaattctcacaacgttatagaattgtctctatcaccaatttacaaatgagggtttgaactttaaattttaacaagaagttaggctcttttaaaacacacacacactgccccattttttatgagtaccatttgaaagataaactaattcgtcatccgcctctaggattctaattaaacaatctatagctatttttaatggcaaatgtaaattcaactccattagagtcatgaagcttgtctcctgtgacttaatttttcctgcccatttgtcctcccaaaaatatactagagagctaactgtaactcaaaatgaagaatccctaactcattaaatgctctgtagttgcatgagggagttgcctcttgtgctaaactgccaaagatggggaggagacagctacaaacataggcaagtatcccctacgctaggacaacattgccatggcaaccagggtaagggcaaccagctttgagtgtgaacctgctcatggatggtcctcatgccttctctggttccaaaggatggatggaaaacaaagaaacgcaagtccagtgctcgtagaaaccacaaggccctgtctttctctcactgattagttcaatgaaataatcatgtgttttaggagacccaggccttggccctccgctatcttccttcccagacagcccactgaacacacactcaacgcatacagaaagcccatttcaagcagcattctgaaattcaccgagaatgacaagaataataaggctactgatatatccctaccatgacattgaagcagaactaattggcttgcatactctctctacctggcatctaatgcccagattaaaatagatgacaaagttcaggtaccccaatagcttcctgcactgcagcctctacaaatgttagctatcaaggcagcagtccaaactggctccttccatagggtcctgactagggaaggaaatgtttgcaaatttgcacagctgcatgcaataacaaattcaggctctgcaggtttacaaaatcccatcttctccctgtgattaggaacttgggatcaacttgttttccacaaatgatttttcttaatctggaagtaggtacaacagaggaacttcaaaatctgtttcttttgagacaattctcaatttttaaagtacttattaaacattgctaaaatgtgcagttcttatcagcaggatttacaatgacacttggaaagcaatgggatttactgcttttgtggcttttttttccccgttctggtagtgaaaaaatgttcccgataaacagtaatagatatccaaaaatctgcaatcaccaccacattagttgatttgatagttgctattactgtaaataatcagaatcacaataaaaagtctatgcctacaaaatgaaatcacttaacaaactgtaaataatcataatctaagagcagcaaattttcttcaaaagcaacttggcttttaacaaactaaataattcgtatatattttaattactttatacctatggtggcatgtgcacatgatagagagaggaagaaatttgcaaatgaattgatgtggcctgatcatattgtttaaggtaatagatcaccaatctgtagaaaagccaatgatttcactttcttggtgttaacacacaattcaccaaataaaccaatataagtttaggaaggattcaaagcagcttttacttgtagctatatgaaaccagcaagtatttaattaggctctgtgaacacttcggtaacaatctaaattaatattctgaaaagatgagttttaaggttctttctatgaaatcattaaagaaaaaaccctggaatcattaaaaaaaataaaatttgcaccagatgctacctttattgtatgcaaacaacaaaaccaaagttttctgaaccagccatctgtctttgctgcatggagtggccacaggacagagctgaaccacattttgtggttccacattagtaccctaatcagttatcgatgttatagaatcttgatccttcatcatactaaggaaaagggcaacctatgcccttgtccccagtcgtcagtcattatatagtacccaatgattgagacccaaagagacactccatagcaatgatgttttggctcatcctggattagtctggtgatcctggcaatgcctgattcactctgaacttcagtttccttacctctagcacaaaaacactggactggaacagtaacattaagacccatgcaacagtaacattataagccaatgtgcatgttaaagtcaaattccattgattttcaaatactgagaaaatagccaaaaggaatggtgcagaagaaatggtgggtccttactatgatttgctctgaactttcaataaaaatatacacgtcttggcaatggtatgtaatattccaataagcctggtttgaagactctgaatttactcttaaagcaacaggcagaggcagtgtgactgtcatttgaaccacctgagctttgatgttaaaagagactcaagcgccaggacacattgagcaaatccctccaacgctattacttccctccttctttcctacttatgttcaccttttccagatgctgctctgggattattaccccatggaatctttcacgtcttcctggcttgggtcctaccttgcttctagcagtaggcacgaaacacagagcctgaaatacacacaccgtatcttcttacctctccagggttcttacacctcagcaatagcagcagctccaggcagtagcgagcccccatactccccacgcagagcccctgtgcagtgtgggaacagagaaggagacaggaggcagggagggacactgctcaaagtgctagaggagccggccaggcagtctccctgtctggaatgcacaactagaggatctcggagggagagagccttgggtcactgtgatcctctgagtcagacaccctggggagctcttagttctgaaagtcctccccaggcacagaaggctgaaagcccccaagcacccactaggaagaaaagtgtaaaagttaaaaagttaaaaagttgagataaatgaggtagacatatggcagtttacagtagatggtagaaatgcagtatgattgctggagggaaaaaatcatttgaaaaaaatgctcactcacatatctgatgagagatttgtatccagaatctgaagaactcttacaattcaataataaaaagacaacctaattgaaaaataagaaaaaaaatctgaataaatatttctctgaagaagatatacaaatggctgataagcatatgaaaagatgcttgatatcattagccatcagggaaatgcaaatcaaaatcacagtgaggctcatgccggtaatcccagcattttgagaggccaaggtgggcggatcacttgagctcaggagttcgagatcaacctgagcaacatggcaaaacctcgtctgtacaaaaattaaaataaaataaaaaacagcctggtgtggtggtgcgtgcccatagttccagctacttgggaggctgaagtgggaggatcacctgagcccagggaggtcgaggctgaagtgaactgtgattgtgccactgcattccaacctaagtgacagagtgagactctatctcaaaaaaaaaaaaaaaaaaaattatcacatcacgcccactaggatagctttaaaaaaaaaaaaaaactgttggtaaggatgtggaacccttacatagtgctggtgagaatgtgtctccaaatgttaaacatacatttgccattatactcagcaattcaacttttaggtatatacccaagaaatatggacatgaaaaacatgtaagtctgcacaaaaacttgcatatgaatgttcctaacagcattattcttaatagtcaaacagtcaaaacaacccaaataatccatcaacagatgaaggaataaacaaaatgtgtcatatccctacaatagaatattattcagccacaaaaagggatgaagtactgataaatactacaacatggatgaaccctggggacattatactgagtgaaaaatgccagacacaaaagaccaaatgaaatactggctcttattcccttgcaacaatcattccccaattacaccaggctcttccgaggtcaccattactcctgcaaatttacctatgtgttttggcagaagctacagtgagaggaggcttccatctcagtgtggagctacaaccactggtccccagcacattcagacccttcttctcagctttgcttctaggccactgacaaaaattctgttctggcttcatggttcagccccactcctccccaactccttcatttctgagtagtggctcccttctctccatgtctatggttcctatctgtgagagtttttttggaacttacagttgctcttgtatatcaggtagttggcatctccaaagagattaaatgcaacttaagcacaatggactctcacagttcagtgggtttttcatagctgaaattcagtaattaattgtgaccctctgcctttttcgcagggaaaggatatacttttttgagcacttaaacaaaaaaattagggtattgcctccaggggccattgtgcattttcactatcataagtaaaaatgaaattagaaggcgatgccaatgaaggaagcagtccaatgaagagactgccactatggtcattgggttaaagaaaaggtcgacattcttatgtaattttatcatccactaagagaaatacattacagttactgacattttaattattaattttaattcttctttttttgcttgtttgtttccatatccttcatctttccaaactattcctgggtacaatggaccaatgcccttgaacattattttcttaacaataactagttctatcctgtgtcatgctcaaggtttagttcgatcagtgcattctgctaacaggacagaagtctcaaaagaaagatttgctagtggccccagttagctacaacacatggtttctggagtcacatttttggccaatatgtaacttttgcctattctgggtttgtcttaaaaatctcaacctttaaacccttgaaagtatccatttttaaaggttgatgccattgccttctgaaaaatgtcgatcaaagtgtggaggagaaggcttcctgtctaaggataacaaagctgcaaatgaacgttccccaaagcgccggctgtgttcattttgtactgaaatgtccatacaggctgattctgaaacacactcgagtgttgtgggtaatagatgtcaaaaaataaaactcaggcacacgctatgttactttttaagggaaaaaagtggggggaaatcaaagggtttaacaattttattcattggcttacattcagcgactctgaaaatttggccactactcaggtttgcaaatttctatggaaaatgaactgtgtttggcaagctcaacgaaatatgaggctgataaaaaaaaaatgtttcatgctttctcaagaccttatgccactaactgtgtgggattggaaaaactgtttaaatgtcaatttaaatactgtaaataaatgattttctatatccatatgaattaatataattctgttgatttcaggccataacttgaactaaagtttctttgaattttgatgaggaaatgtttcagacacacacaacacaaacttcagattaagtagtttagttcagtagagttgtttcagagtcagaaatgttaatgcaatactttattttacactatggagaactgactgaaaatttgattgacactaaggtttttacaaagcaggtcttgaactaaaaagaattagaccaaaaaagacaaaaatattatcgtaacagcccaagccattatacaaaaaaacatggtggtaaatcccattgcaaagttcaggactctcaaatactatctccaaaccaatcatctttgtgtttatggagctgactatccagctgccttcttgacccttctacctggtgtctcagggtcatctcaaacttcccttatccactaatgaactcttgactttctcttctggcaaatgttttggtatcctagcctcccacatctttagaggtgtttacaaagcatttatcacaatgcctgcctggtatgcagcactcgcttaatcagtgttgttgtggatgatgatgatgattattattattattaaataatgattatttttatccacccagttagttgagccaggaactaagtcattttctttattctcctcttcactgcatgttctacttttaatctattaccaacttctgtcaactctgcatccaaaataaatcaggaatctgacccctcctctccatctttactttcatcactccaattccagcccccatcacatttctcccaaacaaatttagcagccttccagacaacctagccatctgctcttgtccttactcaatttgttcatgggggaaataacagtaatcttcttaaagacaattcttcattttgagacatacatagagcatatcacatatttattaaatctgctaaacaaccttaagaggtaggtactgttattacttccattttacaatgaggaagtgagtgaagagaggttagaacatgctcaactttactctgcctataagaggcaaagccagaattcctgcctgggcagtctggctcgagttatgtgttcaactgctacacaaagtaccacaccatatccaaccttaaaaaaataacaacaaacaagcaagcaaagatcatcaacgggcttccattgcacttagaataaaatccatccacatagaacttgcctatgtcaaagggtctggaccaacttccttagcctcacctttcatgcctcctctctttcctcctgttcttcaaacactcatggacaaggcaagctgggtcctgattaggggtttctgtctatgctgtttcctttgcttgaactgctttcctaaggcgtcagtcacagggctggctcctcctttttctggtctctgcttaaatatcatctgctcaaaaagccttccttgacttccccaatctgatattaatgtttcctggcttcttgatctcaacacactgttgattttcttcttagcacttatctcaacctataattgattttacttgtttgtgcatttgtctattggctgtctctcttactgggctggaggcttcacaattagaaagattgtttatcactgtatttttataatctagcatcatgctaagatgctaggtttaggtgctaagaattttgataaatgattgaaggaagacaagtacgctttgatgatatgaagcatccccacacagaccttagattctccaagtgtgggcaaaagatcaaatacagaatcacctggggttactttttgttaaaagtgagttccaggagctctgagctattttaagcacttacttttgaggttcatctccttgtattatcaagaatttttacaattttgattttgacatgatttggcaataagtaattcatcggattctcgtttggctgtgattttttaagtaattattgtgcgtgttcaggaatacttgttaagagaacaaaatgtacattacgaattgtttttacatgtgatgagattgttaaaaatactagttgacaatgaaattggcacttgctatgtttttagatatataggtgagtatttacatcattactttgggagtcaataatttccttttcagcttgcagaaatttatatgagctcctgaacagcttgtggatcctctgccctgtaatcagataatggtgtgggatggatgaaatggaccagctggagtccagtcccaaattgatcataacagaacttctgatgtcaaggaatctgcattttaagaaactttccaagaaactcttatgcaaaataaaaattgaaagctgtttttctcatagctagatttatgtatgttattttagaaaaatttgcaatagatatccagtgttcactctttaaatttgtggttgatttctgagaaattcaagataatgtcccacaaaaagggaaaacattttgctaaggataatggcctccacctccatccatgtccctgcaaaagatatgatctcattcttttttatggctgcatgctattccatggtatatatccttagcaaactaacacaggaacagaaaactaaatactgcatgttctcacttataagtgggagctaaatgatgagaacacatggacacatggaggggaacaacacacactggggacctctcagaaggtagagggtgggaggagggagaggaacaggaaaaataactaatgggtactaggattaatacccgggtgaggaaataatctgtacaacaaaaccccatgatacaagtttatccatgtaacaaacctgcacatgtacccttgaacttaaaagctaaaaaagagaaaacataaaaatattgataagatcaccaagtgtccataaatgcaaattatcaataatcgttctggtgaaataaatcatctctgaaaaatatcttttgttagcctgcatatacagattgagagaaagggacaggcatttctcaccctggaggggcaggatgaaccatttgcccagatggaaaaacaaaagcaaggtaagttccttagcccatagcttcgctatgttttagactagctgaccccagccatttttggcaccagggaccggttttgtggaagacaacttttccacagacagtgcggcggggatggtttcagcatgaaactgttccacttcagataatcaggcattagttagattctcataaggagcttgcaaccaagatccctcacctgcgcagttcacaatagagttagcgctcttatgagactctaatgaatgccaccactgatctgacgggcggcggagcacaggcagtaatgctcactcctgctgtgcagtcccattcttaataggccatggactggtactggtctgcggcccgggggtcgggaacccctgttttagatgataagtggatgttaagaaaattaataattgacggcaggaagaggcttcctggcttgctcaaaagacgaaggctgttttttctcttttagggaaagatacccaaattccagaatttgaaagagcttaagttaaaaacaaaaacaaaacaaccagccatgtttttgacgtcaattaacaaatgtgagaataagctttgtggatgccacactcttttgagtgtctatcacctctctgaatgtaacataatgttggaattcaccatggctctgttcttgaatctcctttatttttcatctgcaattcctctttggtgattttaaccaaccttgtatctttaaatgacatctatgcactgatagttacctagtttatatctccaactaggacatttttttcttgaattccctgagttcttcaacttcttctcaatattcttctctatagtgttccccatctaagtcaatagcaactcaatttttccagtagatcaggccaaaacttccactctctatcaccaatgggtccatttcacaatccatagtcaatctgtcagtaaatcttgttggctgtaccttcaaaatatgtcagaatctgacctcttctcataatttcaatggttccatcttggtccaagctatcatcatctctcacttggattgctgaatgactcagtaaagacataggttctgcaaagcccttctttaaagtagtcatctctcctggttgaaggtaatttctcttgggaaaatccagattgtcaataagccacttccagtcatatccttttctagaaagatattaatgcagataacccagaaaaaaatacaggtgaagaaacacttccccaaatcccacagaaaggtttggagagtatgtttattctttagcagttcacaggatttttaaaaaattaacaaataaaaattgtacatatttattgtgtacaagatgatgtcctgacatacatatacaattgtgaaatgtcttcattaagccaattaacatatgcattacctacatagctgtcactttttgtggtgagaatacttaaaatctactctgttagtgattttcaaaataaaatacattgctgttaattatagtaaccatgttgtacaatagatctcttgaatttattccttttgtctaagtaaaatattgcatcctttgaccaacatctctccaaccctcagccccacccccaggttctggaaagcaccattttagtctctgcatctatgagttcaacttttttagattccacatgtaagtgagaaagtgcagcatttgtctttgctttctgtgcctggcttatttcattgaacacagtgtcctccagattcatccatgttgttgcaaataacaggaatttcttcttttttagggctgaatagtaatgatgcctgaattcccctctcttgctaataacaaaatagtactattatatgacgggtatttattgttctggttgacagtgtatagcatggacatgccacatgcattttggggctcagtgagctgatcttggtaatactgttccccacccacgattgatctcagaacccaggcctaaagccttttgtactataggcaccagcatgtgagggaaatgtggctggaagcctttggaaatgtttcctagaatgtaagtgagttataggcagaggaaacctttcttcttctatgccagagttactcagcactattgacattttgggttggatcattctctctggtggggctgtcctgcacaccgaagatgtttagaagcatccctggcttttactcacttgatgccagtagcacctctccacttgtgacaaccaaaaatgtttcccgactttgccagatgtctcctggggtggtcacccacagttgagaaacactagcttagacatcgtcatatttatccccaaactgccacaggttctgttgctatcagcctagaggtgacacttagagggacataaaatgaagagcactgcaggaaaaaggtcaagtcactggatgaaaccctacatacttatggattttggtgacatgagcctctaaaattcctaattatttaaggtggtttaaatggattttgcttttattataagccaagggcatcaaagtgatccaaggtccagaatcacaggccactgtacattgctttcttccagggcatcatactgcttggagaaatgacaccggccccaccttagagcaggattccatagtacagctttacatgaaggatggcaagtagaatggctcatttttccatttcataattattgcttatacactgttgttatggaattatagaattttagagcaggaaggaattttagggatggagaattaagctaaaaccaatgtctatgtttatcttcaaaggaaggccttcaaaagaggatcaagcccggtgcctccaaatattagggaaagtgccattatccacttcaaaacacatcctgagcatgacaagtcatgttacatcttgtgttaaaagcaaaaggaaatattttcttatagccacatacccttaaatattcccttctccataaatggaaattctatttggctttaacgtctacatcaattatctatttacagcagacttcctgtcatttccaaaagcagagttgtcatttaattctactatccagcaatattgcttttaatgtgaaaaatgatgaatagatacagctggcataattgctggactttaagttcatagcatagtggggaaaggaagaagataaaaaatacaatcaatttattttactgttttatatatatacatataaatctgcattatctttgcttataacagcaatttgagcttacaactaatgtaatcataaatataaaaataagcaaaatgagtaaaattaaaatcatccataatccaacaatcattgattatgtcttaatgaatattatcccctatattttttgcatattgaaattttcttctcaaaaagtatcatattattttgcaatctactatatttaaaacatccccttttatcagatatttagctgttacttattcatccccattgtaaacagtgctgcatatgaatagttggctgaaattattaggttggtacaaaagtaattacggtttttgccattactttccatggcaaaaccgcaattacttctgcaccaatctaaataaattatatatgcttagaaagaaaaatggaaggataaaacacaaatgaagaaattctgaaaaatggaccaatatgtaggatattgttggcttcaaaatcctgtgaggattcaactgttgatccagtccccaaagcaatcagatctaccaatggataagaaccagggcagacagcagctgccaagaagacagaggggagggaagagcaaaccagttttgcagtgaaggaaaccacccaggtggcagacttgatggaacaaacactttaagtgaacctaatggaaaatggttcaacaaatggaccaccagtagattttctcagtttataaatgatagacccattgcctagagaaaagaacagcttttattcaatcatataataagtaaaaggaaataatttgctcctctaaaaaagtcctgtgatggtaactccacatttctatatctatatctatatctatatctatgtctatctatatatctctctctcaaaatatctgtatttatatctgtatttgtattcatatttgtatttatacccatacctatacttgtacttacatatgtatgtgtcattgtacccacatatcttgccagccatccaaccatccatccatctacatagaagtgcttcttaaactggagtatgcatcagaatcctctggagggcttgttaaaacacagattactgggccccatccccagagtttctgattcagtaggtcttcaacagggcctgagaatttgcatttctaatgtttcagggtgatgcagctgctgatggttccgggattacactttgagaactgctgcttacacctgtacccctctcattctctctttctatctcattaccaaactctaatttaatgaacatacagttacccgcacatattttgattcattatcaattgtcaatatacatcacagtgttaaatactacacaaaatagatattatgctgatttcaaatttctctccccttaatttaataataaaattataagatacaaaaattattaccatgtatatttttcctcccaggagaatacttaaatcgtggtacatttcttgcttttacttggttttcactgcctttggcttctaacttgatgtatttacatcttaatggttcagatttattttccaaacagtgagatgaaacagggacaactcaaaggcagcttcattttgaaattggccaggcttttgtaaacaaacccttgacagagcaatttctaattctctaaacagctgggggggaaaatatcacacagaaaagcagatgttattcgcgtaacttctttttttcaggtctacaatcatcatctacagcaccggatccaccatatcacttcaagtaaattttgactttgctaggtttcaaccacattactcacattggagatgtgagtcaaagaataaagcttctcagagacagctctgtggatgcctcttcatgttaggttgacagcttttgatttaagcgttctgttagctcatgactgcagcatgcaataggaacacagttcctcagatgccaaccctaacctaaataaaagctagaccggcatctcctcagggtcaagttaaagaatatgggctgtgctgtctcagacctcagcggctaccaattagtgggagacaagacatgtataaaaggaaatttaattggtaattttaatggataaacaactgcagggttgagagaaagaggtcacttgtgctggtggagttggggaaagtttcatattccatgcattcagatcttgagaaacaaaggttatatctccagaaagcaaaaggcggacattgaaaagggaagcaaatctttacagatgaagtcacagcaaagacaatctggagccaggaattaacgtgtgacaagagagggaataatcccagggatgatgaattttactactgaaatgattataaattacagccacctacaacctattgtgaatggcttttatggtatcagaacagaatagttaaaggaataggaaaaaatcttgtgccctaatgaagaaaagggagatgtgtgttttgctcaattcaaagaaaatatctctttacacacacacacacacacacacacacacacacacacacacacacaggtgtataatatacacacacacacatatataaacgcaaacacatatatgtgtatatatatacacatacacctacatatacacacatgcatacacacatgcatacacacactcagaccttatggaataattctaattatatataaggtctccttgttcccattaaacatccaaaatgcccctagttgcaaatacttcagcaaatagtccctgaataaaagatatagtcagccaacattgaaataaagctgttactacaaagaaaaatattttgcaaaagagacagctcatagactgctacaatacaaaagtctgcattttaagagccataactgtatatggatgtaagcggtgtttttaatgttaaatacatgttcaatatttattactttttgtaaattgtgccatgaaggaaatttactggaagcaacaaaatagaagaaatggtaacaatttctaagtgttttctaatgtaacaatttggcctgtagttctaatttatttaaaaatttgttcaattgggcacaaatttagttgcacagtggtattttgatgtaaaagttagtataaaaagcaggaaaagtgaacatttttcaaaataagtaccttttctaaaaatagtaatattttgaatataaaaatagtgcaataaatgctactcacaagtaacttctcaataaaatgaatgattgaataaaataatacatctaaatttgctggctctcagatctgagctcccagaacttcaacagccacacacatatacgcacacattttcaaattcaatgttatcctattaaaaataagcctgtgttaaaagaagttgtaactgtccatcacaccaaaaatgcatagtttagccacagccattatagcaattttcatattattcaaaaagaaaagattctaaagagtacaaataaagcacaaagcagatgttcaaaacaagtctgcatcaaaaattcaaaaacatttgccacaggaatggcgcactttcatcattaatatacacctactatgtacccacaaacattaaaaattaaaacaaattaaaaataaaaaagaaacggatcataaatattacagctgccagtttcctggtgagaaatctttgtgaagaaattgcagttaaagtggcgctctggaaaataagataaaatgacaattaagagattatcttttctttctgctgtgacgtgacatatgtgagtaagactgttggcatacccacagatacagtgatgcaagttaacatttgcaaaatgtcccaaatctgaagaacatctcaagaaaatcactggagaataaagaaaacattttattgatcatctctacagtacagagtttctcaatcttggcattcttgctatttgggcgagatcacttgtttttgtggtgggtgttgctgtcctctaaactgtgggatgtttagcagcatccttggccagtagcaaatcacccctcccaaatgtgaccacaaaagtctccagacattggcaaatgtgtcctggggggaggtacaaaatttccccagtgaaaaacactgatagcatatttttcttttttgagacagagtttcactcttgttgtccaggctggagtgcaatggcatgacctcagctcactgcaacctctgcctcccaggttcaagcaattctcctgcctcagcctcccaagtagctgggattataggcatgcaccaccatgcctggctaattttttatatttttagtagagacggggtttcaccatgttggccaggctggttttgaactcctgacctcaggtgatccacctgccttggccttccaagatagcatacattcacataaacttatttgatcaattgatgtggtaaataggataaaattgtccacaatgttatattcatacagaactcattctgtgaattttgcctaagtgttgtatgtacacatttttcatatttaagcacaatagattgacaaatctggagtgactatttcttaggtataaacatttttaaactctactagaatgcttctgctgattatattaaaatttgaaggattctcacccagaagttgtgatttggggtttaacccaaaatgttatcactgctttacatgatgtaacttatattatattttggataaaggaaaacaatctgtttctgctgtttgaatagaagctccaagtaatattgctaagcatagtataccctgaattctgaaggttttgatattagttatcagaaataccttagatgaatgtgaatggtttgtaacaattattcaggaatgagctggaaaaacttctccctggacagaactggcaataatgtggaatattacagaaatacttaattataaaaaccatacaagtcatacttttgtccttaaaacttatcttagtcaaacacgctagtaaaatgaacaaagagaaagtatgaggggacttcaaaaagttcatagaaaatatgcattatgaaagaactatacaaaaatttcaaatgtatattacaccaaaataaattcttactaacttgttataacctgccttaacaagatctagtttgaggcactaagaaagataagacatcagtttgaaaagagcccctgtcagggaaacatgaattctgctaaaattgaagcaagaacaaacatcaaatttatggtgaagattgggtggaagaatggtgaaatcactgatgctttattaaaagtttatgaggacagtcccccaaagatatcaacagtttgcaaatgaaaaactcattttaagaagtgatgagggctgagtgtggtggctcacgcctgtaatcccagcactttgggatgctgaggtgcacagatcacctgaggtcagaagtttgaggccagcctggccaacatggtgaaaccctgtctctactaaaaatacaaaaattagctgggcttggtggtgggcagctgtaatcccagctactcaggaggctgaggcaggagaattgcttgaacccgggaggcagaggttgcagtgagccgagatcgcaccattgccctccagtctggtgacaagagtgaaaacccccatttcaaaaaaaaaaaaaaaaaaaaagaaaaaagaagaagggatgatattgaagatgaagcccacagcagcaggccatccatatcaatttgtgaggaaaaaaattcatcttgttcatgctctaatcgaagaggaccaatgattaacagcagaaacaatagccaacaccatagacatctcaattggttcagcttacacaattctgactgaaaaattaaagtcaagcaaactttacgccctaaagttaccaaaaccattgcacttagatcagctgcagacaagagcagagcttttgaaggaaatttttcacaagtgggaccaagatcctgaagcatttcttcaaagaattgtaacaggaaataaaacatggctttcccagtaccatcctgaagacaaagcacaatcaaagcagtggctaccaagaggaagtggtccagtcaaagtaaaagcagactggtcaagagcaaaggtcatggcaacagcgttttgggatgctcaaggcattttgtttgttgactttttagagggccaaaactcaattaacatctgtttactatgagagtattttgagaaagttagccaaagctttagcagaaaaatgactacaacaatgctcctggatcactcctcttatcaaacaagggcaattttgtgagagtctctatgggaaattactaagcactcaccttccagtcctgatttggctccttctgacttctttttgcttactaatcttaaaaaaaaaaaaaatctaaagggcacccatttgtcttcagttaataaaataaaaaagattgcaatgacatggtaaaattcccaggacccttagttctttagagatggactaaaatggcgggtatcattgatcaaaaaagtgtcttgagcttgatgctgagaaagtttctatttattatttcttatcttttcatttaatttgtcccatgaactttttgaagtgctctcatatatgcagcacaaagtagtggttggtttcacttaaaattcttttgagacggagtcttgctctgtcgcccaggccggactgcggactgcagtggcgcaatctcgactcactgcaagctccgcttcccgggttcacgccattctcctgcctcagcctcccgagtagctgggactacaggcgcccgccaccgcgcccggctaattttttgtatttttagtagagacggggtttcaccttgttagccaggatggtctcgatctcctgacctcatgatccacccgcctcggcctcccaaagtgctgggattacaggcgtgagccacacttaaaattctttagtctgataaatgttccaaataagaaaaataagaaaatgtttctactaattctgtttaaagtgtgtgactgcattgtttaatgataataaatctagagatcaaaatgcttatcaatcactattaaaattataatgtattcactgacaatacaggaattactcaaatttaccaagaaatgtgggaaatttttaagaataataagcatatcaagtgggtgcaacatgcttacttcaataatacaggacaaaatatgaaagctattatttttttctgaattgttcatttctttgtataattttctaatgaagattattcatttaccactaaatataatcaaattattgtatcataattaaatgcacaaatgagaaaaaacacctttgttagtctctacatacaaatttttctttcagaaaatgttgtcactgttattcacattcctacacagataacatctgaaacctgtattttggtttctgtaattattatttattattgaagtgaaaattatctaaaatatacctcatttgaaagagaaaaacatcctagaccaaacttatttttaaaagtagttatgctattttgctagaaatatgctaatttgctagattagtagctctcaactgaggatgacttcacacccaataagacatttagggatgtctggaaacatttttggttgtctcaactgaggggaaggtgctactggcatctagcggctagaaatcaggcatcctgctcaacattctgcaatgcacaggacagcccctcacaaaaaagaatgatctgcccccaaatgtcaatagagctgaggtttagaaaccctgctacacataaaattgtttcccagtttaatctgtgcaacaaggcaagaagcacgcaattcaaaatggtgtgaagagaatccctgtttagagagtatataatgttttaccaaaggaatttttctttttctttctttctttctttcttttttttttttttgagatggagtttcgcttttgttgcccaggctggagtgcaatggcatgatctcggctcactgcaacctccgcctcctgggttcaaccaattctcctgcctcagcctcccaagtagctgggattacaggcatgcaccaccacgcccagctaattttgtagttttagtagaaaaaggatttctccatgttggtcaggctggtcttgaactcccgatctcaggtgatccacccgccttggcctcccaaagtgctgggattacaggcgtgagccatcgcgcccagctgggattttttttttttcctatggaaagcggaatttaaattatcccttcttgctattgttggcacctcacaaagcaggaaacacagttgaaggttgaggggatcatgtactttgatattgactcaaagtaatgccttcactataaaacaggaatcacttgacatgctaagaaaaacccatcgtagaaatcaatataactaaagcttgaatgaatctgagtaactctttttccctcgatgtcaaaagtaagtggtagcctgtattgcttaggaggcactattaaaaaacaaacttttaacagccttaagtaaacgttttcattttccataaaactaaatgatggcacagtaatatgattgcttacagctgcaaatgcctcatcatgaactaaacacttgttaaactttgagtaaaatttttcttcaatggcttacagtaaaataaaagcatttttaaaaattatttcattaaataatgccatggcagaccgcttagttaaataatgtcatagacttgacccaatcatccactgatttcatgataagtacacattaaatctaaaaaaaacccctacatccctaaatacaaatgactttataattttacattagggagtagcactgtataagttactaatgttttgtcccacccaaaggaaggaaaaatagaaaacttcatgctaggaaggaaaaaaaagtttcctatgtgtttaattttcctaaatgtccaagatattctttagattacatgtcatcaacacttcaggagaaaggtgtcaagtttctgaatggggtagtaaagagaagttgaggtaagaaaaggacatctgacattcattcctgctaagaaagaaaagaaaatcttgctcacacatttcgttttaaagacttgtaagggaaaagtttgtctaaaatttcaaataatacaaaacaaaacatattcgtcattcactttttagtatgcattacttcaatcagattgttttgttctaaggccaaactaaattcagccctttaaagattggaaaatatttgatgttgctggatgttttgcaaagtatcaaataattttggaatgttgaacacctatgggaagggcatactaagtgagtaccataatccagagggatgttgtcaaagataggtgagtaaagaggcatttgaataccagcaataagccaaaaaatgtcactcctcctaaacacagatattatgggttcatttagtgactattaccatgtcctctattggtgccagggatgtaggggctcaggtaaaaagatatcaaaaagtcaggtctgagcctgacttcacaatggtacctaggaatttgggggcaatcataacctgcttttgagtataatcgtgtgctacagaggaatgtagattagatttatcaaaacaaaagtcctggttattcatttacaacaggctttgtgaccacagaagttatcccaagtctttgattattctacaccattacaagatactttacagggttttaaaggtactttacaggtactttacaggtactttacaggccaaaaagcatcaacaaagacattgctgatttagtcagcatctggcctgcttctctgacatgcattaatatggaaccctttcaaaccatattcagtgatagttcatattgaatccttcacattacaagataatcacttttgtggtaaattattttgttttggtattagattggtgttaatttttctcatttcatcgtgaaggaaggtaaaatgttgtctaaagtcatttctgaactttgcacatacatctccaaacatctgagcattattattctgtacaggagatacagttatggtataggaaggtacaccagtgactagtggaccagcatagggctggagagggtagggaacattaatgaagtcatgctgaagtccagatgggggagccagcctccgatagattctaattcagatgcagcatttattgagtaatttgggagcgagttacctacatggctcacttttaaaatggggataaaaatctcactctactaggatttttgtgaagttgacaaagattctatgtgaatgcatgatgagttcttagaaaccagtaacagttaactgaattcagtgcctgaccaccaccactcttttctgtcacgtctcagggtactctgccacactggctaaaatccaaaggtttcctaccaattctgtcaaggattaatgatgtacaagtgtctgcccttgcagaacttctagtctatcctcatagttgttgagaatttctgggaaaatctttgtttctgcagcttgtttgaggtattttatttttttcaccaccaaaaacttttcagtaaaacctatttctgagtgtggagatatcttcgtctcccaaagttgctaaagggcacctgaagccttgatgtacaaaaattctaatttcaatttaattttcaacacattcaatccaaagactattaactcatgtagctagatcactcttcagacataataactgaatgttctaatcaaaatctcccagagttacaaaaaaatctaattctgcaaaagacaatcaatgtaataattacagaggtattatggtgactcattagaaaaggcaagtgttagaaaggagctttttctgtaaatagcagccctatcatctttgcaattcgactaatcccattacacctacacaagaacgaatttcaaactttaataataaatttcatgaaggttaccgagcccaggcaatgttggcaccagagttatgagatcattatgggaagttcgtgaacctggtgctagagagatgattcatcagctctctgtaagatggtaaagattttatggatcaacatgggagtagtcatttttcaatatttcaaaagcctggcttgggtattcaacagtttgacatacttagctgtagcagcagccacagtttgtttagtcaggggcaacaggaaagagtgataaattagaaaacgtcaagccattctttccctcacctgcctgactttaagtaattaatgacagctgttttaatgaattgattagtttaataattgaaaaatgcaagacactacctttatttctgttatttctcccatctccttctaacaagatgttcaagaattgtatctctgttaaagtacaatcacgtgtcaatgatgaggatatatcctgagaaaactgtcattgtgaacatcatagagtgtatttatacaaacacctaagcattatcatacagtgtggcagacatacaaagagttacatacaaaaaggtacagaaaggcttactagtgacctagtggaccacgaagtgaacatcatagcatgtacttacacaaacctactacacacctaggctagatggtacagcctattgctcctgtaatacagacctgtacagcatgttactatactgaatactgtaggtaagtgtaacacaatagtatttgtgtatctaaacatatctaaacatagaaaggtagagtaacaatatggtattataatcttatgagaccactgttgtctatgtggtccattattgacagaaacatcctcatttgtaacatgactgcatattcgcaagtggattccagccaccattttacaataacaacaacaactacatgcacaacagcaaaagctaacaattttttagcactgactacatcccagctactgttataagcacatctcaaggtgttccaccaagctggtgaggctgggggatgtcagcaatggggttaaagggtgcaaagcctcagaaacgaggaagacatttgagttttttttgagatctgctgcacagcatgttgaatatagctaataactgagtaccatacatttcataattacagagagtaaatttcaaatgttctaatcacaaaaagattaaatatttgggatgtatatgttaatcagctcgatttaatcattccacattgtattcaaaattcataacatcacttttcaccaaataaatacaattataatttattaatatataattttaaaaattctgagagcccactagatttctcaagggttaacgagatgcatgtgggtcttagaacgccaggaagcatagcaactatctccttggcgtctctgaggaggatggtcttgaaaaccagataaacacaatcttttacacatcccgcaaatattaactgagggcttcgtttgtgccaggcatagagctctatgctctagatgtgtttactcatctaatcatcacaacaccaccattgctcccatttcacagatatttaatagaacagtggagaaacttgctcatagacccacggtaagaaggtggcagagtcaaaatgcagagaatagatttagcaaatcaattggagtcacccagtgaatggtgtcatcatctcagcacccaactggaaagctgcaggatccctctcttcctttcctctctattctcatggatgttagaatagtgcctggcacatgttcagcatgttagaagaattttgttggggctcagaaaacagtatctcaaaatgaagactgctgctgagcagcttcagaagcaaaagtttctcctgaccttctcctgtcctcctctcagtcccattttgccctaaggatagccatggaaactagaatcccttttccccaagatagatcatacaaatcagaaccccttttcctgaaagtcagtcataaaacctaaaaatattctacgtaaaaactggccatgaagaaatgatctgacctaactggtttgactgtagatcctaagactcctgttccagacagggtcctctctcacatcaagaaggaagaaatgcttctcagagaggccaagaataatctagatggacaggccttactgggtttcccctactcagtccattagcatttaaatcagaccctttctgtccaatcacatttctacatggctgtccacatattgttgaacctaagcataaaaatggacaactgtccattttcccctgtatgttaggtattcattccgaaggtttctgtgtatacaagttaaataaacgtgtatgccttttcttctgttaatcaatctgcctcatgccagtatattttcagtgaccctttagagcgcaaaggggaagtttcttcttgactcccttagagttagtaaatgaaataggtaaaagacatgagccaactgctcccactaaatgagtaaaaccatgcttaagataggcagaataaacacaagcccctgtaagctgcaaagtgaaggcatttagtcaggcccactaaacaaattctctatgtgaattcaaatgctatagatatgttactgatttactgtgttattcttctttattggttttggaggtctgagaccatcacaaagaggctcttgtggtctattcttggcatctcacaacatctcacaatgttgtcatgggtaagataactgataactgtttgttgattagactttcctgggcaaatataactgaatacagagaaatcatagacataactggctatgcttactttaaaactgtgaagctctgtataaacaactaacaaaatggggcatattgctaaatcaatgagagcaaagtacccaagtccaaggctattttcaaatgatacgtttacctcctcacactaatctattcattttcattctttgattggattttaaaggtttagctcaagtgtggttctcaaaaaaactagacatattacttccacctagtgaccctcttgccgctatatttttcccaccattttcatgatcaagctactcttagatccatcccctagaaatatgctttctctgaataatcaaattattcaatccttttttgtagattctgctcagggcttccctatgacgtctggcttgctctggtattttgggtgctgatgaatcttagagatatacacatatattctcattaatttgcaacttttttcttgatgcaaacaaacacaaagcaatcaaaacaaaaatgttctagaggacacatacattcccttatccacagtgcagggccacagggtacagacagcagaaagtcatgtgttttggcttgctggtactaccagagatcttcatccctatgctttgtgaagtgaatacatcaaagtgcctctcttccaagatggtttgactcaagttcatgttgatgaatgcattttagactaaacttttttattttgagataattttagattcacattcatttgtaagaaataatatagagccatctcctatactcttctcccagcttcccccagttgtaacatctttcatgactatagtataatgtcacagccaggaaactgacattgattcaactatcttatttagaattcacaagttttacatgttatcatttgtgtgtgaatgtgtgtatgtgtgtgtatttagttatatgcaattttatcacatatgtatctttgtgtgacaaccacaatagtcagggcacagaacagtttcattgccacaaggattcctcttgctacccctttacagctatttgcacctccctctcaactcatcatcttcttaaatctagcaaccactaatctgctttccatattcaatgaagggaggatgtccaactgggcagaggcaacatccagcaggagacaattacacaatcatcgaagaagatgctcagataaattgcagttaccttctccactgagaacagtaaggctatggcgtcattagaaaattatgttctttattcttaaataaatccaagtaggatggggcttgatatactttggctgtgttcccacccaaatctcagcttgaattatagttcccataatccccacatgtcatgggagggacccggtgggaggtaactgagtcaatgggatggttaccctcatgttgttctcgtgatagtgagttctcacgagatctgatggttttataaggggcttttgccccttttgctcagcaagtcttcttgctcctgccatgtgaagaaggacttgtttacttccccttccaccatgattgtaagtttcctgaggcctccccaaccatgctgaaccatgagtcaattaaacctctttcctttataaattacccagtctccagtatgcctttattagcagcacgaaaatggactaatacagggtagatggtcaatccagcagtagaatgggatgaaaatctaggatagttaaaaatctttgtgcataaggaaaagaatagcatgaaaaaggagaagagatagccttttctttttcttaaatgagaggaaaaagcaccttttattttccttgctgcagtggcagcaaactcattggttttcataaaacacaacttctgcgatatggtctgttgataaggttgctccatcatgggaggacaaacttgaggctgactgttaatgacagaactaggtcttctctcaaagcctctaatgtgtgctatttctcatgaagaacccctgacaccgtaagatgcttcagttaaagcttctgaaatattgcagtggcataattgacaagttttttggtgctatgagtttctcacacatgtaaaccctttcggaaaagttggagataaaaagatgggggagagtttggtttagagtcacaaagttccagataccagccacagatgcctctgcccaatgtcgctacatgttcttttctgagaaatgcattcaatcactcagtattacgcactgtggttaaaaaaaaaaaaaaagatctactcaccaccatctaccctcccttatcctccatgtgaagctcacggtagcagcagctgaagacagaaaagttgtacctgttccctcacaccagggacattacttggtgacctggtgaatggcataggcaagattacccgtgttgctggaggtgatccctgccacagggatgcagtcatcctttgtcatacagatggaaaaccccttggttagcttctccacctgttcaggctttagccttgtgaaacaaagcatgccaatttagtcagtcatgtgttgtcagatgtgtgaggaactctccttactgcagttggagatcagctgagtctgcatgctagtaatgcagttggccatgattttcacttcttgcaaccattattttcacaaacccaggctgttcagaatggtagaggcaatacaggccccactgagagaagggttggaatacatgggatggatcaggatcttcaactgactcccctcttttggtttcattcactgtctttgcagatcacagtgaaggctctcatacactgaccatataaagcccatgttcttggcacatgattgacagagacaaacattaatgctctgttcaatgaagttgcacacagcccaggcatccttgttaccatcaccactggcaaagccttggtaggccatatcaaagaacgcagtttctttttctttgccactattattatttcctttcactgctttgcatgagggtcccaggcatgcaggagaagagcactttgctctggtatttttgaaatgtcctccatagcacccgtgaagtcaaaactgcaagtcttggggttatagaattgataatcttgtagttgcatgccagctaccctgaagataggtgtgtgatttccccagggtggtttggacagagacatctctgtcttcaaaaactttaaaaatctttgcacaaaactggctccaacccttaaaccccagttccagaaatgatccacacagtgacagactggccacttttcaacactttgctcttctcacccaaggctggttctgcagatgccttggaaaattcagcttgtccccaaatgggcaggtattccttgtctaaatttttttattatattttaagttctggggtacatgtgcaaaatgtgcagttttgttacatggatatacacatgccatagtggttttctgtacccatcaactcgtcacctacattaggtatttctcctaatgttttctctcccctagcccccaaccccgtgacaggccccggtgtgtaatattcccctccctatgtccatgtgttctcattgttaaactcccacttatgagtgagaacatgcgctgtttggttttctgttcttgtgatagtttgctgagaatgatggtttccagcttcatccatgtccctgcaaaggacatgaactcacccttttttatggctgcatagtatcccatggtgtatatgtgccacattttctttatccagtctattattgatggacatctgggttggttccaagtctttgctgttgtctaaattttttatggtaatctaactgggtctcttattgtcccggtaggcaccaactcccagattcatctttttgctgttgatttccctcttaaaggctttggtggttcccaggatgggatctggaggtctcatttccacatgggcccacaaggagctggctctggcagaggccatggtggggaggcctaggtaaaaggtggcagcgatcccctagaggacacggctggagtggagcagggccgggtcatggtggaccttgagagtgcagtgggtaggcacaggacaaagtagaaggcaagaaggtgcagaaccagggggcatggactcctgctgaaggtcttgttttgtattagaagacctccacagtggagtgaaaaatgaagtcacttctctgtatattttgaattaaagcttgcacaggtgtttcagcctgctaaatagttcaacctggactatttcagctctgaattattcaaataattatttttaaaatattttaaatttaatttagcacacagagaatgcctctgtgtgaagtaagtggtggcaatttaaaataactaatgatcataattattggaatctagtctcctgggcattttctacttcataatttacagggagcctatgagagttcaaacacactgtattttcgccaaaggagtctcatgctttgtctgcattttatggcttcctttgcacctggagcagctattttaggactgtctagacaatcaccccagctttaaaggtcttttcctttcttttcacatagtcactgagcatgaaggataataaatagatgacgctggcactctctcaccaaagatactattcaaatagagacaggaacaagaaggcctttgctctggctcacaaaatcaagatgccttaatatacagccccagatgtctaccaattggccaaacttgaaaccaacaagaaggccttccaatgtccacatctctgtagtagctggatcatactttttggttgagctgcgtgaaatggttactatttgaccatcttggacatataaaaatggcaatttaagatgtttcgatccaagagatttgggaaagaatttgggagtgctctgtttccttttttcctctccaattcccaagcaacattcatctgggttctagcaaggacccagaatgcacagcttctgcaggccacttttgccactacagggaaataatgcagccaagcatgattcaggaacatttcctatatacgtgtcctaggtaagacctaaaagttagtaagtaatatatcccagggagacgtacaccgggtcagtttacttcacccctcacagtcatttctttcaagaggtaagagacaccttttaagctctccacaggactcctacagcccacctgtccccaggctctttaatgggttccgagattgcatcccaatctcagaccctcctgggaatattcctacttggtactctctgatggtgaaagtatttcattttgtaggaaaaaaatacacaagggtagatatctatagatatatagatgtacattgcatataatatacaatataatattcaattacattatatacaacatacactatatatgtatttttacattatatactatatatataatacgtcacctagcaatgatcagttttatttgtttccttataatgttagagtatttctcagtacaacaagatgtgcacatattaattttctgctaacatcataccatttctactgtcgtgttcaagagctatctccaccctttactctgtcccactttctccactgatgatatgtgtaacatgaatcagtttggaggtctgaagtccaaagcatttctcctgagtataaactggagcttcaaaaacaagagcagcccaagaaggctgggccaagggctgagaaatttcatatcagtgccactcacaactgcaaactttgtgccaggcactgggctaaatgcaatggtaagtatggggatacaaagtagatgaatactcagtctccacttaagcagatacaattcttataggggaataaaattacaacaccaagtggagcaaacacagcatagaaccaagtcaacagatgttgtcttacttcattttgtgttgctataaaggaatagctaaggctgggtagttaataaacaacagaggtttattttggttcaaagttctgctggctttacaagatagatggcactggcatctgcttggatttcagcagagcttttgtgttccattaaaatatgtctgagaaggtcaaagaggaagcagacatgtgcaaagagggaccaaacccaggggtgtcctggctttctagcaacccactcttgcaggaactaatcaattcccctgagaaccaatctagtgtcaagagtgagaatgccctcactgccatgagaacagcaccaagccatttatgagggatccatccctgtaacccagacatctcccactatgccccacctccgatatcaccatgctgaccgtcaaatgtcaacatgagatttgatggggacaaacaaaccatgtccaaaccacagaaaatatggattcaaattctccgagggccatggcttatgagcagcgttattagggcaatttgcttaacttaccctatttcctcccttgagtatcagttaataataatttgaatcttacttggcatttaataagataattactgaaaatttatgtcaggtagagtgagactggcaaacttaaaatactataaatgcaagctcttatttttagtgagcatccactgcatgcatatactaccccatttcatcctcagcagtctcaatcttttaatgtattactactttcttccttttagatagacaagttgggcaaaaataagttaattaatctccccactaacagaagactctttcctgcaggaaaataatgaagtcccgaactgaaggcaaacttctctaaagtcatcagcaatttttcacttctcaattgccaatatcttctcactttgtcagttttcacttcccagacactccttcaagcaactcaatctgttttctacttccactattcagataaaactggtttggtaaaaattcccaatgctgccatgttataaagctgaggggcgactattctgcttttattctacctgatccctcagcaccactaaacctagctggccattcattacctttgccatctggacctcccccagcttttgctatacgcaccccttttctctctttttccttcactagccacttgctctaggttctttgctgctgcttctgctcctttagagctctaaatgctggcactcctcatggctctgttgcaggccaacatctcttagtcaatccttctgaagatgtgtctggaatttgtgaacctcctgaatcagctccaccagaaagaaacaagcttcatgagggaaagaacttttgcacataaattgctgaattcccaacacctgaaagaatctcaggcacactccaggtgctcaacaaatatttgctgaaggaatgtgaattgcctgaagtgcttgagatgttcctgggatgcccttctggacatctaaattggaatcacagtgcatctgagaaccaaaatctctggtcttctaccacaccgacttttatccatgttctttccttaatctgatatcctctcccacttcctcattctttaatgcgcagggaagcctttcctgaccctcacctccacccagatttagtcgaatctccctctcgtgccctttcatagaaccctctcctttgtggtactgaggtcccttaaattttacacatatctgtgtgactactgccagcctgtctcagatcatacaggcttgcactcaccatcatacctccatttcctcactaagtctccctcatggtgggccctcaataaatatcagtgaataaattgttaataatacagattttatattaacgttaatatatcaaaatataataatatatttaaattgtatatttatgatataatgaataattaaaagttaaatgatgacacaaatttctctctcctcagctctgagctctcctctgaattctacatgcatatccccatctaggggcatcacatctccaaacggatgtctaatgggtttctctatttcagcctgtccaaagccccagcttttaaattttccaatacaaacttgtttctctctcaatattttactcatgttagtaaatagcatcacccacccagttgctcaagcaagctcttgagagtcacatctgattcccccttttccttcaccagccccttacccatatctaattaaacacttagtcctgttgcttatacttctaaaatatatttcaaatccatcccttctccatctccacagctgctgccaagcccaatcttccattaacagtcaactggatggtggctgcaaatcaactggtcccctgtatccattcttgctggtctaccacagattttctacacagagctcaaaacatcaatcaaaccatccccattagagccccatcctaattcaatggcttctcactgcaatgcaatgaagtacatacaccttagtgaagctctgcctatctatctacagcacctcatggcattgctcccttcactcactagactcccaactctcttttgtacatactgttccctccgcctggaatgattaccccatgtgtccccacccacacctcacacagctggcttcttctcctcctccagtcctcagattacatgctgccttctcagagtaaccttcttaacagtgtctaaaatagatttcggccgggtgcagtggctcgcgcctgtaatcccagcagtttgggaggccgaggcgggtggatcatgaggtcaggagatggagaccatcctggctaacacggtgaaaccccgtctctactaaaaatataaaaaattagccgggcgtagtggcgggcgcctgtagtcccagctactcgggaggctgaggcaggagaatggcgtgaacccgggaagcggagcttgcagtgagccgagatcgcgccactgcactccagcctgggagaaagagtgagactccgtctaaaaaaaaaaaaagatttcgccttcagatatctgttgtcacagaaatatttctgttctttacacagcatttgccacaatttggaattactgatttactactgttcattatcttgtttccagatagaaacttctatgtcagtcttgttcaccatttcatccctagcacctaaaatggagctcagcatagattatcaataaacggttgttgcatgaatggacagagtggagaaaaacggtcagattaatacagttccaacagatcaatggttgccagagcctgagggtgaaaagaggggttgactacgaaaaggcagaaggaagagatttggtggtgggggtgggggtggggggtggtatatatagaattcttctgtatcacaattgtgatgttggctacacaactttatgtatttgtcaaaactgatagaaccataccctccagaaggtcaattttactctatgtaaattaaaaaataaattaataaaattatgattccaaaacccatgtcaacccagaacaaatctaagattccaagattcacaggtttagagtttttttgttgttgttgttctggtggtggagggttcagttaacttcctgtgttcatggtcaaagtactgactcaaaacatacttccctatttttcatttatcagtttaaagaaaggaaaccggaaacaaaataaagatgtgaaagataaataatacaagaaaaagcacagtagtaaaataatatttaaactaatcatgtgataaaatgtcagcatttattcatgacatttggctctgtttgtattggatcaccccagcagggcagtggctgtgggttgatttcataatagtgcctcccacatgtacgcccacgcctgacctctgctttgtgcagttgataatgactaaacttcacatattatgctgacaaaatctactccttccctggagggctgttacacacagggaattggagtttcacagctgaacaatgtttctttctcaaattctgggatgatccacttccattagaacaaagttatacgggctgataaattgctgtcttttgccaaagtgttactcatcatcgtatattcacccaacagatgccactgagaaaccccatcctatcagggggaaagaaggatgcagagatatgaatagactgtttagacacaagttgcattccctaaagtaagcacatgacatacgaatttcaccttatgacatttcccccacccccacccccactgactttcatccattagaacgtgttgatggatataccatttcaaaatgaaatatttggatatctgactctgatttggggaaaggggaaatggtgagctaatttcctcttttatcaagctgaatcactaagttcgctctgttgccatgcacgcataagtaatgccatagcaacctctcagtttgctcttaaacacacaacagcagaagtatgcgaataggtacattttttaatccttagattttcttagcagcttaagttttataagacattttatggcaccggattatttagttcacctttggtagtcttattgctgactgacacatatatcatcaataccagcacaacagaaaggcttagttcttggaaaattttccaataactttcctttattctcaatctctagctcacaattaaaaatttgcacattggacgctatagtctggatcctcttcaggattttctttataaagatcctaactttaaatgggactgaaatatataatttgaaattcatgaaatatagaaatacatggacctctcatatagctatttaagtaaattcaatgaaagtgtcattatcacttggtatgtactaggaattatgtcaggttctagaaagaaagaaaatctttactatcaagggattcagatgaactcctgtagaaaataagggatgggtactcttgaattctgccactttgaggtttagatttttatgcctacaaaatatatggtaacacctaactttatactagtttaagaaaagtccatctaaattgagaaaatgtggatttttaaatagttttattacctcatgcatttcttcacaaatgtgtacacttctttctactggatgacaacaaaatgagagcactagtactatggaaatgccttttacaaaacaccatgtcactgctctctgtcaagtgtctttggctgatagactggatgaataattgacttgttcttgaaatacctgaaatgggcttcagattccatacttgaatctaacattatttagccacttctgccaaatattttaattacttaaggagttaaggttttgttattttatagagaggcaatacacttcaataaaattttagatatcccatccacccttccatgagcatatgttaatgtatccaaagctaagggaatttggatcaagtcattttcacttaagcacttatgtataatttgaaggatacacatcaggaaacagaaaatatcaactttctcattgaccagatgcgtttaaaaatgtctcagtgaactggcatcccttcatttccgatcaggtagagagctgtgcattcataaaactactaggcttgttcttaagcaaagcttgctgttgctagctcttgctgctcttagaagtgggagcaaaaggtttgattctatagggctgtcctgattgtaactatagaattaggaagccctctatatttcttgatgaatcatattttaagttatttgtatactatgataaaatgatttttaacttttaggaatattaacttgaggccttaatagatggtccccagggttaatattcatttgaaatgctaatatagagaaattctttacattaatgattgtcaaagtatagtccctaggagagaaatgtcaatcttagctggaaacttattcaaaatgcaactgtttgaaccccaccccggacctactgactaggcactctggagatgaggccggcaatcagtattttaacaagccctctaggtgacttcaatgcactctcaagtttgaaatccactgctttatataatacacattgctcatctgggataatacatacagagcaatttatgttgagaaatagctcttttcttctttttgatggtgtgttgttttttgtgtgtttgcttgcttgttttgtattctgataaaagtaattgaaaatgtttaatataaggatttttgcctatcccagtatggttatgacacaagatcacttggttcctgataaactaaaaagtcattgtaaatgttgttttgaagaacaacctaattaaaatatattttattagcagcaataataagaggatgactaatttgaataatctagcaacttgagactggggaaacaatatggcttagagtcagagggactttagtccagcttaaatcagggttactcaatataagcattattgacctttggggccagataattctatgttgtaggggtgctataggatatttggcagcatccctggtctctacccactagatgccaggggatgccccttctcagttgtgataataaaaaatgtcccattgtcagatgtccccttgcgggggcaaatagtccctacttgagaaccactggtcggtccattgggggttctcaacctcagcagtacagtagaatcaattaatactgatgcccggccaggcgcagtggctcacgcctgtaatcacaacactttgggaggccgaggtgggtagatcacctcaggtcaggagttcaagaccagcctggctaacatggtgaaaccccatctctactaaaaaaatacaaaaattagctgggcatggtggtggcaggtgcctgtaatcccagctactcaggaggctgaggcaggagaatcacttgaacccaggaggcggaggttgcagtgagccgagactgtaccactgcactccagtctgggcaacaagagtgaaactccatcacaaaaaaaaaaaaaaaaaaaaaaaaaagaaaagaaagaaaagaaaagaaaagaatactgttgctcagactggttggattgaacctctgtggataggctcagaatcagtatcttttcaaagctcggtaggtgatacaaaggtccagccaagactgccaaacactgtacagacatcccagtgcatccatacccttacctgggagagagctgtaataccatctattgtaactatcacacaagatcagatgagagagcatttatgaaagcatttataccacaaggcaattagtatgttaaaggcagcagagaaaaataatgtacttttcaaagttgccattgaaattgaaaaatatatccagctctctattatgaattaggatggtttatatttactgtcttttagattcatatcccattcccaataggaaagagatgtgatgcattctctatgtctctcttgggagtagattcatgatattattcagtcttcgatgggcagaaaaccatacaaattggatcaaatcgttcatactatgcaccagtgatgctctgaatatatactataaaatcaatattctttctattcttttgcctctcaataaccaattttaataagtggaaaataattcagattcctctgacaatagcctctttagaaagaatggggaaaattcttgggttacaattgtgtcaatgaaagggattctttattttaaaaaagataaaaatatccaaagcaaataagaacaaatgttaacagttactaaatctgagtaacaaatacatagatacttgttttcgtttttctatatttttctttgaagtatctgattcaaactcaaagaggatgctaaaatcagtttgaacaaagcaccagtgaatacttcaaagaaaaataaagaaaaaagcacgtttttcttggtgccaggtgactatgtagaccccatggggatggggaggccagctgggggccaaggggctgcatcccacagtgtctacctcagtttatattgccaccttacgcaggcagggcacgttagcctttgatattcaagagcagttctaactgagcagttcagctagggtgtaaggaaatcttagtagttgaatttttttttcatgtgctctaacagcttttaaaacaaggaaattattatcaatatctgcttctactctccctaatgagttgcaaaagtgtgtaacccctgcctttctctctaatagaaccaatatggtagcaatggggacattttacacaaaagtcagagtgaaaagatggacttttaggcacattttttttttttaagagatgagggtttctctatgctgcccaggctggacacaaactcctggggcacaagtgatcctcccacctcagtctctcaagtagctgggattacaggcgtgcaccaccatgctcagtttaggcatatattataaaagaagcaatttgcctgaagcactacactcccctgtagactgtggacagataagtaagcaaaacaatttttctcccagagtaggagttggcaaactacagcccctgggacaaatccagtccactgtctgtttctgtgaatacagtattaatttaacacagcccagtccattcgtttgcatattatctatggcttctttcagctacaacatcagagttgagtagttgtgacaaaatctgtatagcctcaaaagcctgaaatacttaccatctgtcccattacagaaaagttccctaactcccatcctagggtattaacatatgaatttgttccatagagccactgtaatcccagcactttgggaggcggagaggggaggatggctggagcccaggagtttgagaccagcctgggtaacatggcaaaactctgtctctacaaaaattagccaggcatgctggtgggtgcctatagtgccagctactggggaggctgaggtgggaggatcacttgaacccaggaggtggaggtttcagtaagctgagatcatgccactgcactgtagcttgggtgacacagtgagaccctgtctcaagaagaaagaaaagaaagaaagaaagaaagaaagaaagaaagaaagagagaaagaaaagaaaagaaagatttaataacaagtggacaaaataaaaaataatatttctcaatgacttttatagtcacacagtagtatacatttatactacatttttgctttaatacagaaaaaacaattataaagacccaaatattgtcaccttttctcttgaaaaacaaacaaacaaacaaacaaacaaacaaacaaactagtgtgctctacaaaggaaacctaaaagaggatgtgttgataattaataatgtaacacattgttaaaatatcactgtttgatagtctctcaacctagccatttcctagagtaagactattttacttatatacctatttgcagttgaataactgtaatacaggtaaaaatactaatgaaaatttataggcaaaaatatttcccttttatagaaaaatagaagtcacagctgtacgctagagaaaaatagaaaagtaatcttttctttcagtccttacaaaataattacttctatagggagtaaagatgatatttgtgttttgacataagtaaaagcttatttttagttcatttcatatgcctggactttccaatgtttggggaaattttaagaaatggagacgtttttgtagctatataagactctattatttccagaagcctcataaattgaaaatgagaccttactgacattctttcttttgtttcttctcaaaaggattcccaaataggaaaagagtatgtaataaaacagagagtgcagagctatggttgtcaaggcaactgtaataatcttgcccttgaactgtggtagagcatccactgcagttcaatctaacctcatgtttcctcagaatgcttatgtatgttcgaaatccttattatatagcaatatcattccaatcaatcaggtgatgataggaatgtagaacacgaactgaaatgtccatggcattcccattatggaaggcagacaggaaaatgacacttgctagcatacagaatagctaagagaacatgtccttccactccacgccattcaacatgcatttgggacactatactggctactaccattaatagaaacataagtccagcccacaaagtagtgaatccagattaaatgagctacaatcctgtgataggtccccatagccctaggaactatgacaaactacagaatggctggtatacacactcacaaattgccactttgtggaaaaaatggtcactatttatgatcatcaggttttcttcatagtgaagagaagaaaactttccccatacaatttggaagaaactgttactacttatttgtatctcatctgatgcttccttcaggactgcagaggattgtgttttctctaggagatagtcagtatcttagaggctgggcagctagagtttgcctcactgaacactaaatgatctttgcttatattttccaactcagacactcctcaattctgaaagtctgttaagatagctggatatttcaaagtccacatgcattttcccatagaaataaagatacagtggttttggttcgtaggtcagctcaagtagtctcatttaacctatgacatacgtgaagtacagagtgggaagtacaaatgtaaaagggaaccccattctcaccgttgtgagaccctggaaaacagcaaagagtccccatcatgggataggggaaggagcactgggttgggatcagaagtctttgtctgtatcagttctttctctgtgcctccaggccacagaccatctcctctgaagtcagtgctgaggcccctggatccagctcaatcacttagctcaccatgggaactcagcacatcatttactggaaataaaataataagcaccttgccatttgatctgaggtcgtcatttagtcatttgaacatttatttttctgttttgttttgttttgagacggggactccctctgttacccaggctggaatgcagcaatgtgatcttggctcactgaagcctcgacctcctaggcttaagcgattctcccgcctcagcctcccaaactgctaggactccaggtgggcaccacacctactaattaaaaaaagttttttttaagagacagggtctcactatgttgcccaggctggtctcaaactcctgggctcaagcaactctcctgccccagcctcccaacatttcaatatttctgagattcaagattctcctccataaattagatgtttgggaaaaataggccaggcactaagcttctcttactctcaaattgtattacccttagatatgtggataactcctgttattcctgtttttttttttttttggtataatagtgataacaatgggttccataaagggtggatgggaagatatcataaggatagagacagagttaggataagcattttactattggtgggggattgaaaacttatatttttggaaaggaatttgctgaacaaaatagacactggcattttttgctgaattgacaatgtgataagaagcactccccaatttcccctctcagttatttttgagtaagtcctaccccatcttcctggtgtctccttccactcattaaacaaatttctttgttttttgtttctagtgtatttatcaccatctcacttaccttattttttaccgtgtatgtattggccatcctttggccctctagaaataaagtaccatcagggcaggggtttgtgtctgttctgtccagaactgtatctccaaagcctagaatagcatctgcacatagtaggcattcaaaacatacttactgaataaataaatgaatgaatcactgaatgagagcaaaaaaaaagaatactcttcttcagatctaaataaaatagacatttcaaagtatatgttgaggcatccactgaagacaaattttggaatattatgaaatccagtaggaggaagattattttttgtcagaaaaactaaggtaaggagacccaataccccagactactatccaaaagattgagtaaccagggtgattgcttagatacagatgctcttgatatattagaagtaaacatgtataaagaaggaatgcttcttgtatttctacttaggcctgggaaatgtctggtacaatggaaaacaccctgaggcagaagccaccaggcatccagaatcagtggattcttgctctgcctcttagtacctgttgactttgagcagctagaggacttcccaaacttcagatttctcacttataaaactggaatatggccccctgccttacaaggtggttgtgagggtaaaataaaacgtaaggaaacccagaaaaagaagatcttcagtaaatgatggccactcctactattgccatcaccaacagtagcctgctcaagtcacttaacccctctgggctccagttcccttttctagaaaatgaaaacattggacgagaatgatttcaaatggacctgccactccaaaaatcctgtatgctcagtttcactccctcaaatatgtaactatggggctgggtgaaaaaacaagatcttttaaagagaacctagacttagctatagaggcttattaaattatctgtgttataattctacattcataaccctaaaatataattttcccttaaaaatattcggaaaaaaagtttcccatgtcttggcaaaccaaactccagagagttttccagtgtttggaaggggctgaagggccccaatattttaaagatgaatataatttggtgctgaaatcttccttttgtgtttatgactatgtcccaaaacagaatcctagaagagagaagtgtagcttagaaatatcaagagactgcctaagaacccagcagggtttcatatacattttagttgatttacactttaaaattgttactcacttacatgtttccacatttctactgtcccaaacagaatgaatttgacaatttgtgaatcatgaaaaaagaaagaaaatcaacttaataaacaagttattttccctttgggtcatatgtaccccataagataactttaaagcagcacttacattacagagacatttacttgggattagcagaaaataattttcaggttgctggtcagtctttaaaaatctttttaaagaaattatgtattcaaagagctcccgggggaaaaaaatctgttaactataatacttctgaccaacaaaaaaacctaaatggtctgcaatacttctaagttattagtgaaaaagacttccctttagtacaacacaatttttaattccttgaagtatgtcttggggtaacaaacacccccatcctttaggtcatattcaaattacacacacacacacacacacacacacacacacacacacacgcatgcatacacagtgcaccacccacttctctcatttcctcctgtaaccacaaaacggaatgttttactacaatcatgcacacccattttatttacataaaaatgatgcctttaaactggtaaagaagcaggagatcataatcagaactgaaattagtcaaaatgaagaaaaatcttttaaaaataaaaatgaactttacattctaatatatttgtgcctggatcaagagctactatattaaaataaacattcatatcatataactaaatacacgtgacctagaaacacccaacttacaaatatcctgtacatgagaacagtcgacccaagtgagccaggccaggaacagggcaggctctccccagacttgaaggctagagaaggattcctctaggattcccctccatctcgtcctgctggatagtggcgttggaagtgattagagtagaaaggggaagtgagaagccatgggccttgtaccgcctcagtactgtcttcccaccattctcaacgaggactccatttcccataaatgttacaaagagtgccttggttcccaggccggaccgtcagaagtctgctggacccacagtgcagctggaactgtgctattaatactaggctgacttcccacttggaagccaactccagtcctgacagtgctgtcagctctgttatggttaaatggatttctgggcggtcctgggagcctgccagtgagaacatcctttctgtgggaaaattcctaccgaggcccaaacagctcactgtcaaacagggttgtagaccacaagttgtgagagccttaggcattgaccaatcacttctcacctttcccttctggaaatacttgagtgatcattggagtcaactcttacacagagaaacataaggcaagtccaacactcagcatgtgatctgttccatggcaagtaatgtgtatattttactgttgtcattaataaaacgactacaaaaataaattatacctcagtaacaccatgttctaatcaactgagagacatgatcacttaatagtcctcttgaataagtggaacttacgtgtagaaaggttactgttctcatcaatagcaaagaggtagtttggtaaaagttgatgaaatacaagatcaaatagtttacccacacaacacacacacaaagacagctaacaatgcaacagagatggggagttattatagtagcagattgtaatctgctaggagatgaaagatattcactgcctgggagccttaagtacacactgttaactggtccaaataaggcaatggtcatgctgaagcaggtacctttggtatatcttcagtttatttaccagtaagaagtagggcctcccttatctacttaaagacagcacagaaaccactgaggaccaaattagggcatgaaaaagtagaggatctcccatatctgaggccttaagtcagttgatcaaagttcttaaccaaaggacaaggggacagacaagggccaacttcagtgtagtgacttgtcctccatgtagggggtcagaagagagatttcggcacatctgaataattctcaattctccagtactgagtcactaatgataagtcagctttggtgttgtatctctcttacttaatcatccccaaggataaaatattccagtacccatggggaatctgaaatgaggtaagagcaggtttcttaaatgcctgagaatgatattttagttggaatataatatatggatacacacatatgtagactatatattatgcatatacactctgttcacctggattgatgtatacatactatgtataggtatatatactacatatatatgcatatgcacatatatataatctttcttttttatacaatatatgtcaactgacctttagaaatgccttcaaattatatgattcagttcaagcatacttagtaccgtatccatctgtgggtagccaattagaaattcatgcctcactaacatgtttccagactgaaggtaaattgtaagcatgcacatctgtgttggttgtgaaaaacaacatcctttgcactattgaagaaatcttaatgccaacctaccctccagagaagcctcagatccttggaaaattttcagtttgatcaacacacagaggtaagccccagcaaaagttctttaacaggtatttggaaaaaaggcaacaaagaatttccctctctaagttaggctgactagtgtggtgctgtggagacagaaggggatattaattccacatagtgctctctcccaggcaaagcattttaaaacaaaaacagcaaaaaaagttctaatttcaagtcaccctgagaactaaacttcttcctttcaggacatttactgaacttggccagtgcttagaagtctttagtattgagctatttgctagggtgtccttatttaatcagaaacaacctgtctcaggcaacagtattgcttatagtgtgtgtgtgtgtgtgtgtgtgtgtgtgtgtgtgtgtgtgtgtgtgtatgcatggtagtatgtcaatctgagccaacttgtcccaagggccacacctatttcttgagagttaaacaaacccgatttaggataaggagtttgaaattagagatgtggcaagtagcccaaatgaatttttgtctgacccgtcacttctattttagttctctcttccctaattgttctgcctcctctctgtactttctgatcattttccttgacctcatcattggaaagggtgtactcatagagtgggtgaagccatattctagaaaagtcactgcctaggatttttaatgagctaacaatcgtttgtgactacatcaggcaaacttttcatgcaaagaaatgcttagaaagcccaaaaagacagataaattgattatctccaagctaccaaaacaggctggatttttggtgcctgctggctattaaatggttatgtagaagaatttgctctttcatacaacctggtagtgacatggtagtacagcagttaacttttaccacttgtcacttctccagtgtttccattatctgccaaagagaacctaccagttgtgaatgtctaaactagttagggtcagtgagcaacacctagcctacaagtttgttgcaatgattacatgagataaaaagtataaagcacttatgtagtacctggcacatggaaagagctctctctctctctctctctctctctctttctctctctctctctctctctctctctctctctatatatatatatatatatatatatatatgttcatcagcatcatcataatcattataaccatgatcaccaccaccactatcatcaccaccatcattgtcatcatttattgtgaaatgaggactactgattataaaattttagttaggacaggagtaccatccatgatagaataaactgaaaggtaaacacaataatacatagttctctatgtagaaggatcccctgagagttcatcagtctccacatattttccccacaaaccatatatccacttttcttccattaccatggaatctgactccaaaagatttagataaattactgatttcagcagcatgctggacaaatttttccggaaactttgtggatcagacagtaaaatgtagcaaatacagctgtacatacagatggactgaagaactatgcatatcaggtactaattaacaaagtaggcaaatctaccaccacaggtacctggtcccatcttgtttaacatcttcatcagaaacttacataaaagcatgggcagtgattatcaaatttttactagacaactaagctaggaagaatgcataatataatagaagagagaattggggttttaaaatacaattgtaatttatatataataatttaattagattaaaaggttaggatgatactttaaaaattcaagaaattagaaatttgcatttaaattgtaacaattaattagacagagagaggcaacttgagtttaattctgtgaaaaggaagaggtaggatttctaatgagccaacaattgtccgataagctcaaatgaactccaagtctgacaaaagcattacaccaggcaatggaaacttgagctgcatgaaaaaaactttggaatccaactcaagaaaagagaaaagtgaccacgcaatggattccaccccagccagagcacacatggagcactaaactctggtctggaggatacgcctttgaaagacattgaggcatccagcaagttctgaagagggtagtgaggctagagaggggaagatggtgaaagcttggtcatttgacaaacctttgaaatccatgaaagaaactgatgttgagactgaagttgcaaaggctgtgcagtaatagaaatgctgacctaaaatatttgaatggtgaagtagtagatctggcctatctttcaagagagcagatttcaaatgacagaatgagaatttcaggaagtaggcctgggcctccttcaaggagactatatctaaagaaaacattcacccaaggataagtgacttaagggtaaggggattcttaatacttaaaggttcatgcagataaccatctgattatccattctgaatgtggtaaaaaggaatcctgttttgggtgagtggccaaacatatgaccgttagggtgccacaactgtaattcagttctcctgtgtaaagtgtcaatgagtgatatgaggaagagggagggcttcgttagaggagaaggggatggctggaaatggggaaagagcagtttacggctggctttgggtagctgaagagtgtagcaggtagcatagttcccatgataaatgaattcatactaattaattaataaaggctcaaaccaaactttggaattttactcaatgctagtcctattctaatgacaactgagtcaaagatagctgcccaagtgccctatggtctaatccattccctccccatgctggaatgatgttttattctttttcacagtcctcatgacaccttaggcactaggcagcagctttattaactttctacttttgctccagggagttcaggctaaagaatgaggaatgattagtcaacagtagaaactagtttgacacaccacatgttctcactcataagtgggagttgaacaaagagaacacatggacacagggaggggaacatcacacaccggggcctgttgggggtgggggacaaggggagggagagcattaggacaaatacctaatgcacgtggggcttaaaacctagatgacaggttggtagatgcagcaaaccaccatggcacatgtgtacctatgtaacaaacctgcacattctgcacatgtatcccagaacttaaagcaaaataacaaacacacaaacaaaacaaaaacaaaaagaaacttgtttggcaagatgactatttccttgactactttcactaggatatatgacctcaacctaagttgaagtactttgacatcaaggtgatataaacatttttgctgtttttttgagaaaaatatcacagtagtatgtcaatgtgggtttttttcttaaatctcttgatcactgttaatttttaaaatttgtctttttaaaatatactttttaatgtctgatgggacattaaagaatattgttagactgtgcttcaacactatagtgatttaacatattttgatataatataaaatatatagcatacattatgttttgatatatgtaccttaatatctaacaaaactttctagaagaattacatccatttatgtattaaattatactaaagaaaattgagaatttatttcatatttaacacaaaatatccatattgcctggacccagaaatgaggaaaatgatgctacagtgttaaagcaaggttagaatattattgtagagcataattaatggagggagtgcattttcaaatatcctctttacctccttgttgctatgttggctacacacataatactacccgagcctgtacctctccttaatccattgaaaccttttcttgctgaggaatttcatcacagccatattacctgccagtaagtgatagttcaggtcaatttgaaatgccacggcttttgatcctgttgtctctgagtatttcattttagattttaattacaatggtattgtgcttatggaccgaccccaaactgcattgaattgggaagtcattttcctttatttaccttttataatataatttcaaaatgacaggctcatacacaaagcataattctttatagacactggctcatcattggacttaatcacttccaaagcaatgaggatggaagaaatccagggggtcctgattcatggagattcctggcttttttcccactcagttgatggaaaatgttttctctttttaagttagatgagggatggggttagggaaacttacatcctacactcttatgatttggctcatggctttattgttctccaaattttatgtgtttgggtcagttaatcagactcctaactctatccattgtattcaaacagatgtagtacttttttctcctttcttcccccaaagctgcattactttttggatatggggtctctctggccagctgcaaagattctgcctttgtgagagatgacatcacccccatgctaataagtcttttaaaacccagaaattatcttgggtatcctacaagtcatgaacagcagtacactagggatatagcgatttacttaataaatatctgttgtgtggatagaaaagctagaactactagtcaggtctgctttttctcgaacttgagtcttaattatatctttctttaaaattgagatataattcacatactataaaatttaccactttaaagtgtacaatccagtaagttttagtatattcagagtcatgcaaccattaccacaatcaactttggagcattttcatcaccttaaaaagaaatccatacccattaacagttactcctcacatccctctccctcaacccctagcaaccatgaatctactttctgcctctgtggatttgcctgttctggacatttcatatatatccagtcatacaatatgtagccttttgggtctggattctttacttagcataacattttcgaggtttgcatgtgttgtcgcaggaatcatcccttttgtggctaaatatattcttctgtattgatatatcacatttgtttatttgttgatgaacatttggattgttttcaattcttagctattataaataacactgctctgaacattcatgtacatgtttccatgtagacatatatgttcatttctcttaggtagataaccaagagtggagtttctgcgtcatatggtagttctacgttttaactgtatctttctttctttctttctttctttctttctttctttctttctttctttctttctttttttttttttgacagagttttactcttgttgcctaggctggaatgcgatggcgtgatctcagctcaccgctacctctgcctcctgggttcaagtgattctcctgcctcagcctcccgagtagctgggattacaggcatacgccaccacacccagctaattttttgtattttttagtagaggtggggtttctccatgttggtcaggacagtctcgaactcccaacttcaggtgatccgtccaccttggccacccaaagtgctgggattacaggcgtgagccaccgtgcccggccttaactatatcttaattgttttcctcaggtagctatgagtggtctcaattcttctgtaaattcttttatgatttagtgacttcctgcctttttataatagaaaaattggtttggtatattttattccattttatcttcataaaggtcctccacccatgtctagaaacattttaatgcaaagtcctaaagaaagttaaatcctaagcacttatctccttaaaaataaattcagcttgatttagaagaattctgtatgtaaaaaaatgggtaaattccccattcattaataactctttgttataatattatctgttatggcatctccttataaagcaaacacctcaggtactaggtattacaaataatttcttccttgtgtgaatgtcaagtcctctgagagctgatggtatgaatctgtacagaaacattttctgctcactgtaaaatctggtagtgccaaacccatcttatatgagacaaacggatcaatctgaattagtgacaccaaaaacaaacaagtttttccatgtaaacatttttatattcaggaacacacaattattcagattttcaggataagaaactttgttagataataagaggacattatgtttaataaacaaattaattctgtaagtggcacttaaaggaagattaaaggtaaccaaacagtcttgctcatatgtattatcaatacaacttctaaatcttatttagcctataataaaaggcttgctaaaaatgtgtatcagtaccaaacctcctatcaccatattccaatgtattcaaaattcctaatcatctttgcacaagcattattaagccagagcaaacacattcaaaagctagcagaaggcaagaaataactaaaatcagagcagaactgaaggaaatagagacacaaaaaacccttcaaaaaattaatgaatccaggagctggtttttcgaaaggatcaacaaaattgatagaccgctagcaagactaataaagaaaaaaagagagaagaatcaaatagacgcaataaaaaatgataaaggggatatcaccaccgatcccacagaaatacaaactaccatcagagaatactacaaacacatctacgcaaataaactggaaaatctagaagaaatcgataaattcctcaacacatacaccctcccaagactaaaccaggaagaagttgaatctctgaatagaccaataacaggctctgaaattgtggcaataatcaatagcttaccaaccaaaaagagtccaggaccagatggattcacagccgaattctaccagaggtacaaggaggaaccagtaccattccttctgaaactattccaatcaatacaaaaagagggaatcctccctaactcattttatgaggccagcatcatcctgataccaaagccgggcagagacacaaccaacaaagagaattttagaccaatatccctgatgaacattgatgcaaaaatcctcaataaaatactggcaaaccgaatctagcagcacatcaaaaagcttatccaccatgatcaagtgggcttcattcctgggatgcaaggctggttcaatatatgcaaatcaataaatgtaatccagcatataaacagaaccaaagacaaaaaccacatgattatctcaatagatgcagaaaaggcctttgacaaaattcaacaacccctcatgccaaaaactctcaataaattaggtattgatgggacgtatctcaaaataataagagctatctatgacaaacccacagccaatatcatactaaatgggcaaaaactggaagcattccctttgaaaactggcacaagacagggatgccctctctcaccactcctattcaacatagtgttggaagttctggccagggcaattaggcaggagaaggaaataaagggtattcaattaggaaaagaggaagtcaaattgtccctgtttgcagacgacacgattgtatatctagaaaaccccattgtctcagcccaaaatctccttaagctgataagcaacctcagcaaagtctcaggatacaaaatgaatgtacaaaaatcacaagcattcttatacaccaataacagagagagagccaaatcatgagtgaactcccattcacaactgcttcaaagagaataaaatacttaggaatccaacttacaagggacgtggaggacctcttcaaggagaactacaaaccactgctcaatgaaataaaagaggatacaaagaaatggaagaacattccatgctcatgggtaggaagaatcaataccgtgaaaatggccatactgcccaaggtaatttatagattcaatgccatccccatcaagctaccaatgactttcttcacagaattggaaaaaactactttaaagttcatatggaaccaaaaaagagcccgcatcgccaagtcaatcctaagccaaaagaacaaagctggaggcatcatgctacctgacttcaaactatactacaaggctacagtaaccaaaacagcatggtactggtaccaaaacagagatatagatcaatggaatagaacagagccctcagaaataacgccgcatatctacaactatctgatctttgacaaacctgagaaaaacaagcaatggggaaaggagtccctatttaataaatggtgctgggaaaactggctagccatatgtagaaagctgaaactgcatcccttccttacaccttatacaaaaattaattcaagatggattaaagacttaaatgttagacctaaaaccataaaaaccctagaagaaaacctaggcaataccattcaggacataggcatgggcaaggacttcatgtctaaaacaccaaaagcaatggcaacaaaagccaaaattgacaaatgggatctaattaaactaaagagcttctgcacagcaaaagaaactaccatcagagtgaataggcaacctacaaaataggagaaaatttttgcaacctactcatctcacaaagggctaatatccagaatctacaatgaacacaaacaaatttacaagaaaaaaacgaccaaccccatcaaaaagtgggcgaaggatatgaacagacacttctcaaaagaagacatttatgcagccaaaagacacacgacaaaatgctcatcatcactggccatcagagaaatgcaaatcaaaaccacaatgagataccatctcacaccagttacaatggcaatcattaaaaagtcaggaaacaacaggtgctggagaggatgtggagaaataggaacacttttacactgttggtgggactgcaaactagttcaacccttgtggaagtcagtgtggcgattcctcagggatctagaactagaaacaccatttgacccagccatcccattactgggtatatacccaaaggactataaatcatgctgttataaagacacatgcacacgtatgtttattgcagcactattcacaatagcaaagtcttggaaccaacccaaatgtccaacaaggatagactggattaagaaaatgtggcacatatacaccatggaatactatgcagccataaaaaatgatgagttcatgtcctttgtagggacatggatgaaattggaaatcatcattctcagtaaactatcgcaagaacaaaaaaccaaacaccgcaagttctcactcatagatgggaactgaacaacgaaaacacatggacacaggaaggggaacatcacactctggggactgttgtggggtggcggaaggggggagggttagcattaggagatatacctaatgctaaatgacgagttaatgggtgcagcacaccagcatggcacatgtatacatatgtaactaacctgcacattgtgcatatgtaccctaaaacttaaagtataataataataataataataataaacactgtaattctatattgtgatttgcttcccatttgaaaaaaagtatttcctcccttgtcttctaagaaggtactccttgagggattttatagagttcagatttgctgtctttctcctgcctccttcggcaccagtcaaatcattttgtaaaattcactgggattaacaggcattagtaatttgtttatcggtcacatagataaaatttgcctttgaattttatatgaatactgtccacaaacacagaatgttttttctatcttttcagttgactaagaaaaaaactacacacatgcgcatataaaaagcactgtttccttctgatacttcatttgaaagcccctcaaaagcagaagaaaaaaaataaaaccatatgaattaaagttaaggtagaggatttttccaacagcatcatttctgctggttactaagttccacaaatagctaatgaggccaaccacctttgaaatcaaagtgctgtgccccatctcctaatggagccacagtatgctaagggaagtgaaacttctagagtcagcacccagatggtgttgacaaagaaacccacgtgcatggtgcagtgcagactattttttaaattggcctcaaactctaaaaagcacacaaacacacatttggatcacctctgttccaccacacaaaacagtcccagtttgcgtgactccccactgcctggttcacatgctgagtaactggatgctatttcaatatttagctcaggccaacaacattagcaaagcagatttttctcaccttattgcccatggccaaatatataactttgaggtggtctgcgcggtctgcttctttccatatgagtataacattgacctgtatgcatatgattctcagcaatgtagaggtaactgctcacatttgtatcttagtaagagggaattgatgaagcaataaatgtttaacagctaggtgtcatctcccagctgtgtatgaatttctgttataatatcaatgacaaatcattgactaagcttatcttatagacagaagtccactgaacttgcttttagacaacctaagtcgaaattacttttctgaatgtaaattaattcagccactgtaaaaagcagattggcaatttctcaaagcatttaaaacagaactaccattcagcccaacaatcccattattgggtatatactcaaaggaatataaattgttctatcataaagacacatgcacatgtatgtttatcacagcactatccataatattccaaagacatggaatcaacctaaatgcacatcaacagtagactggataaagaaaatgtggtacatatattccatggaatactatgcagccataaaaaggaacaagatcacattctttgcagcaacacggatggaactagaggccattatcataagtggaggaacataggaacagaaaaccatatactgcatgttctcacttgtaagtgggagttaaacatttagtacacatggatacaaagaagggaacaacagacaccagggcctacttgagggtggagggtgggaggagagtgaggatcgaaaaactacctattgagtactatgtttactacatggttgatgaaataatctctacaccacagccccacaacatgcaatttacctatataacaaacctgcacatgtacctttgaaactaaaaatgttaaaaaaaaaaaaaaagaaattacttttccaccaataattagccatgtgaccttggaaaacttaattaactttattagcagcctcagttagttgcctacccaacagtgatttccccttccctccttcttccaaagagaggtctaatgttatttggctattcaaccttccgccacgtgaccaagggtagatgacccatcccggctccaaagatagatcctcattatgtttggtcccttgtggttacactattccatttgccaggaatgttttaagaagggaaatgcatatcagattaagtttggttgcataactacaaaaaagagcaagaaataaaaataacagtggtcttaaataagatgcaaatataattccctggggaattatattttatatactggagaaaagaagacaggtgttaggcaacagggggcaccctgttcaggagtagatagatgcatcagggatgaggctctcaactagcttacttttctgccattttgctgtgctgtctcaggtccggcactgctgctaggagccctggacaacttcagccaacaggaagcccttactgcaggggacttagtcacatgatgacagttagctatacaggaggtagtgaaaggaaggtgggggaaatgcaaggagaaggggagacaactagtagtcattgtcacagcatgtggcccaattcccgcctatgaaatatgaagcttccgggaaagtctcctgctatgaaagagaaacaaaaagagataaactgtacttctccctctgatcagtgtcacatctcaatgtgatgtctgaaactgatgcagccatcttggtaccagcctgagagcaaagccaacaatacacagagcaggacagagcctgcagagagaaggacccaacatcctgacattctgtatggtacccagatcgtaggccatgctggacttcttgtcatcttagatggaaatttcattactgtttatttccaatggagggggagtcttctgttacttgcagacaaatgtcttcaaattcattcgacctatccagtaggccttacaaatttaaagacagtcatttctccctcttggtttgtattttcacaagctaaaaattctagagacatagaagatcaatcaattcttattttaatcactattatcaaaatatatcttgattaatgccttagcaatattaagtaacgtatatgcctatagtgatgtgttattgtcatgtagaccaaaatagaaaagcagaacaaaaagataaaattcattaaatacgtcatattcacgttcattaaaaaataattgttcatttatcttttggcttattgttttataaaatgaatgcagaaaaccataaaataattcaggtattggggttccaattcctggccttaccacttgcattgtgatctaaggaaagcaatttcatctgtgagagccatagttttttatacattaaaaaatgggagaggaataccactggttttagtcagccttggctgccaaaacaaaatatcatttgcttttcacagttctggaggctggacatctgagatcatggtgccagcagagttcagttctgatgagggatctcctcctggcttgcagacagccaccttctcactgtgttctcacatggcagggaaagagcaaggtctggtctcttcctcttcttataagggcactaatcccatcatgggagccccactctcatgaattcagctaaacctaatcactccccaaaggccctacctgcaaatagcatcacactggctgtagggctaggcttcaacataggaattttggtgggacgcaaacattcagtccataaaaccatctcttcttaagaatgtgtgaaggttgaagaaatgtgtaagtggcataatggcagttatatagtactcattaactggcaactatgacatcatgggcagccagtgaggatacaaagacaaagttagtagatctgattcaatatttcattcattcgtttatacatacatacattcagattccacctagttccagaaggcattgaaagcagaaggaaagcaaatataaaaattattgcaatgttttaagttatagaataaattgtatctatcaagaaattatgggtagatagagagatagcagaaaccaagagacatcagatgtcatgaaggagcagaagccatgagggaaagagaagaaaagtcaacgaaaggtatttgagagtagactagagcgacgtgggtaagtgagggaggtggggagaaagagagaaagctagttagcatcaagtctacagcctggtaaatgtcgaatgttactagagtcatactttgcacagggatgagtttcctttgagtcttgcatggggtggtgttcagttttcacaagggctaagatgtttttccccttttaagttctttcctgtgtaactttacaatggatatctcctacctgaaataaccaagtgtgtctctgttccttgcaacatggaagaacataaaacaaagtagtagcctaagccacagaattgataaaagggtgaaagaaatgtgtctacagtgagaggagaagaggcctaagatggaagtatgtttaaggagcaggtgaggaataacatgccttcaaaggagagcaagacatattactcccagaggtaggaggagaaataatagagttatggaaaagggaagaaaagacgttgtcaggaaaaaacagctggattcagaggttccagaggtaacatgcaataaggactcactctcctgaattcgcagcaaagttgcctataaccctgaagacagaagactcaaaggaatgatggggtagaagccagatagcagagagttcaggagtagatagatgagcatgtgaactagctttgagtgtaaactattcttatgagagatttagttgcaaaaaagagatggctttcagaagaggtttgctcaaggaagggttttgacatgacaagatgactgagagtgtagaagttgaagctggggaagagttaacatgatgctatctggagtgaccctgatgaagcagaactgcatgggatttggacaggatgacagatgcctttgcctctgagatgggaggaaatggggcctgtgctgcccatacttgaatttcatttgtgatgaatctttgactacaaggacaaattgacccagtactttcatgtggaactagctataacaaaggatatttaaagttttaagtgagcttgttttaacctcacaaagtattatatataaataatatggtcatttaaaatttcccaattattgttatttgttctggatcttaagctcatatcataagaacattgatggggctaagtttctggaagtgacagatcttgtgcttgtggctggctaatgaatcacccaggaagtttgagagaccaggatgttacctccagattgtgggacttccaggcttccgccctatcaggcaggcacatctgcttctccagatgaaggaaacaaaaccagaatagaagagtcagttggcaaagcaacaaggtcaattcttgccctctccttcctggtttcctgcactgacctggaactatctacgtgaactgccttcaaccaattctgcactctgcaaaaagaattaaagcaggaaggactacactgttctcctctttcagcatccctgaaatgccgtctgactcatttactaaacccacaagttttgactgatctatactgtgcattagactctgtcctaggcactggagaaagcatggtgatcgtaaaatagttttcctatgtagcacagattgccgtgggtcttgcatgaggactaattgttaataaggattcttgttgtttatctaaacggatgcatctgtaaatcttgcttgagcatattgcattactgtttacaaaagggtaaggttgctgtttatttttcggcatggaagatgcacacattgtacttttcatttacaagatacagctcagggtgaacaaagccctaggataaatactcttttctaaaacacacaaaagatgataaactccaaagcttacatgtgttctaattttcattatggcccatttggcccagggttccatatctgtcagaagatccccgtgacatattagggagggcatggttttggctatcatctaaaatagcattcttattcctcctccaattctaacttcccaacctgccttaattatcacatttggattcatcttccatgaattaaaatattagactatatcacttcttaagatacaggatagaaatagaaccaggatgcttgcaatttatgacttccatgaagttaactctaattttatgtttcctaatattgctgttgtcaagcttaaagggtattacctagtcctgttaagttctattgtgtcttgtccatctcatatctctgtagcttataaagtacctgacaaagaaggaaagagcttgataaatatttgtggaataaaataatttaatcaataactaattgtcacccttttaaatttgtagactttaaatttcctgtctctctggtttcatgttttacagtctaaaaaatcctgatattttggtagattctcaccaagtaagacttaggtgcccatatgtcccagtttgcttagtgcagttccagttcatgcctaatgtgccagggtaattattcctagtgatcttttccctttcaaaagtatcccagtttgaatgaccctctaatcactattctcccgggtcccttgagcccctctgtaaaattctacatgtgcatttcagaagctggagaaagctttctttttacaggacattgtggtaggttttttgtttgtttgtttgtttgtttgtttttttgcctactccccttcctgatgataaagtatctctacggactttcagactactgggcaggggttgtctaggaaaagcctagggccatgcttttcaaattttagtgtgctttaatgtatcactgggggcttctgtgaaaatgtagatcctattcagcaggtctggaatggggctcctgatactgttgggctgaggacagcactttgagtaacaagggtctccaagttttcctagttagccatgacttagagcccagctattatgacataacattgcttagtgctcaacaggatactctttagaagccacagagctgaggtcaaaccttgccctcatcactcatacctttgtgaccttacacaatgtattgatccctctaaaactcagttttcttatatatgagatacaaagaataacaattatctcagaggaatgatgtgaagattaaatgaaataataaatataaaacagtactatcttccctcattgtaaatgttcaaaactggtggtagctgaaattgtcatcatcacagttatcaagtgtagtttgaattcctcccccgttttctctgcccagttcttccctgccatttcccccgttttactcaaagcttaacatcagaagttacttgtttagataaatatcaaagggtaatgagcagagatatattttggatagtgccttaaaaatggacactgggatatgctaaactatcaagttgtcagtacatgcaggaattacaatcaaggtttggacagatctacaggaagggccaaaagttggcaattaatgccaattcatagatgcttaattatcacttgactggattaaattccctgggctgaggctgcctcctttagttagcatgcgtcaatagcagcagtcagaagcaattcaattgtatatactcttctaaaacccagaattaccagaagaaagagaatgaatattagaaaaatagaaaagtttaatagaccaactcatcaacctagaccttgttttaaactttgccttctctttttcctaattgggtatcaggtagcagaattccaagtattccagtttcacttactttattttagcctttcaaaagtcacataatctaaaccttcgttttaactcatggaaagtgataggactgaaacagcattttgtaaataacaacttactatttaaacctatagcgtcaacatcattgttgcagtcatcaaaattgttattctcttcctcatcttcaaggtcccttctggctataaacatttctctttcctctgatgtcagtcctaatgtaggacccatgttctttctctctgggtagagtcaccagtgaaagaataaaagtgatatcagaaacttggataattttcttactagaaaatctctacttagtcattgtaaaactggatgttgagtttgaagtgacaatgtgctataggtttacctcctacaattcaaagctcactatagactataattttccattgattaattcattgacttattcattgtacacttgcttagaccatagtacctatggcatgaagaacataataaaatgtctctccctagtgagaactcacagaactaccagggcatgcttcctgaggcccatcacactctacaggtcaatcatgattccatcttgagttaactattcttgacacttacatggcaggtcattttcaaagtatgcttacaaacaacaacaacaacaacaacaacaacaacatgttcttaacaaagattggcccaactatcacaatgactggagggcctacttatagaaatagtaggaataactaatttatattttccaccagggttgcactgagcactgataggtctcacttgatggataattctcaaaatcccttaagaagatttccatgcagaaagaagagaaatcaccagcatattttcattatctgactggagggatggctatttcctagagaacagcaaccaggatatgtgcaacattaaaattaacatggtcccttaagtgtttccctcaccagattggttctacaagcacacagctatttatcctctaagcaagggtcagcaaactataatccatggaccaaatccagcccatcacctgttattgtaaataaagttttattggaaccagccatgcacattcatttgtgtattgtctatgactgtttttgtactcaaatggcagagttgtgactgagatcttatggtcagaaaagcctaaaatatttactatctggtcttaactaaaagaccatgctactttaccaaaaacaacaacaacaaaaccattaagcttgcattgacatttcagtgatttagtttgaagaattcatagatatctttaataattttaaattactataatccttaatagaggtaattaaaagctacaatggagagatttggaataaaaatttctatgcaaatatccctttggtatatggttaatcactaacaaattaatcaaatattatttatgagaaagataatgcctagttttatatattggaaacttaatgaaaaagataacaagtaaacatattcaacagctctgatttctgccagtatatcataaaataaatactagtacttgagctcatgctcatatcctaatatctacataataattaggaatagatgagttgatccacgactctgctgtaagtactacaggaaatgtctctgtaaaagtatattatcattttaatctagatttaatgtatctcataagcttttaacaatgtatatgtgtaatcatttgagaatctagaacccaaatgaaaaaatatatatttaaatggagaagagggttatttctgtgtcctgctttagttaattttaagacataaatatctaaagttgataaaacaaaaggggaaacaagcccatctgcagaaataattttgcagtttatatccaagctacttttgaaatatagaacctgctttctcctttcaaagaccctcaagtatttgctgtagctttattattaaaatatctagatgtgtcattataatcagatggaaaattcagcaaaattgtgttttcttagtaaataaagtatatactgactatatgtttatatattaactttttcccacatgaaaccagtatttaaagctaaacatttttctcactacagatacttcttgactaatgagtcagtgattaaatatataccaagtgaatattaataaagaatggattttttaaaaatcatgttcactttgggatattgatctcatattcctcatgctatgtgaattgtacagaatggttaagaaattattgttgactggcacggtggctcacgcctgtaatcccagcactttgggaggccgaggagggtggattacgaggtcaggagatggagaccatcctggctaacacggtgaaaccctgcctctactaaaaatatagaaaattagccaggcatggtggcacgcgcctgtagtcccagctactcgggaagctgaggcaggagaatggcctgaacctaggaggcggagcttgcagtgagccaagatcgcgccactgtactgcagcctgggtgacagagcgagactccatctcaaaaaaaaaaaaaaaaaaaaaaaaagaaaagaaaagaaacgaaattattgttaacttaattgggacaatgatttacaattctactgatgctgaaaggttaaggaaagactttggaaattcaaaagccaaccacaattaatattgctttattcttttctttcttatcaggtacaaaaaatttggaatgtttatagaatgcttgccatatgtaaatattgaaataaaaattattcatacaaatccctaaccatgaaactaaagattctaataattctaaatttttaaatatgaatattttctatttttttcacacacacacacaaacacacacacacacacacacacacacatatatatatatacttttaaaattaggatgctaaatctctgcccatctgtgtcagccttttaaagagcttgtgattcccaatcttcaatgccaggatacacagatgttagtaggtgagacaacagaccgacaaattcctgcttggtaagtaaaataaaaagtaaaatgtaaaacaggagatcttgttttctctactttggggaaaataaatcaaaacaaaacaaaatcatcaccagccctctcaagttcataaaaaagacattgtttaaaaaaaaaagagagagagaaaaaagcaaatgatagtaatatttatcctgaagcaaggtggctaaaatttgacccaagtacttcctaactactgaaaattaaatcattgcttttgtggatttgaaaaacagaaggtctgcatttcaagcatataaataacatgaaataattgtgtcttcactttgaaagggctatttaccaaaagaatgtgacattctgaggggcacactttggggatgaaatttaagcaaaggtcacatctcaaattcaaccagcctttttcacctgggctgcaatggaatggaatgattgaacaagtgtgaactcctaggcagggtgggcataggtggagttagtgggtaaatttgatttgtttgctaaggttagtgaaataaatttatctcctttggagtgggattccaggtgctaaaaaataaaacatggtgtttgtagccacatttctttccttcattttcaaaatttatccaaatgagattaagttgattggtactctacagagatagcagccacctaccattctgattaatatttcagtgaggaggcaatgtcttattattgagaccaagcaattatcagccttttgactatataacataaaataaaataatcaagaccaatatcccatggaaattatctgaagatacaaacacaagcctgaggagacatccctatagctaagcctgttgaggtaaaggactggagtttgaaggggctcttcctccttcacagaagcactatggcctagctaccctctccgtggtagtaatatggagtgggcccaagagagagcagctttaaaattcaaaacaagatcctggaggactgtggttgacttggccaggtacttaggagccacagttttgctcgtaaagaggctttgagtagtcactccctctcaggtgggctctagggtggagattccatctttgtggtccttgggacatctcaaacaacagagatgtggaagctataaagaaaacctctgaggaagactattcactgggacagggcagatattacatatttccagcatcacaaaattttctattggacaatgctgtatatctaggtgctataacatttaaagtgttagctttttaaaatttatctgcaaccatttcttctcttaattcctcagaagtaggcaatctaataccacctctggagctactatttcaatgaataatcatatgtttgcttagccatattggaaaatcaaataaatctgaaagagtatgttgtccctggaatgtgctaatttctagttactcactgctatgcgtaagaagttaaactaaaacctgttcttcacattaacagacaaaaagggctttctttgtctgactatctaaattgacttcccacacaggaacctaagtgatagcaagccgttaacaatggttgactcatcctttaaatatcaggtctcctttatgtcatatttctgattgtcaccttttgagaaagcttccctaccatcctactgactcccctccatcattctatccccttatcttctgtattaccacctggcatattatatacttattggcttgtcagtctccctattctacagcataatctctttaaaagaaagtattgtattttattcactgatgtattcctaatgcctagaacagtatctctgtttttgttcactttatatatgcttagtaaatacttatagaatgaatttatgaatgaaacctccagaaagcagatacaaaattttcttcatatacattcctctggagagcaaatgtataacttagatcttattctgaacagatttgttctggggcttaaaaagactaagaacctgagttttacacacattatgccatttcattatcagcaacatcattctctgcaatgtccatacatgaaagttctgcaactgatcaaatgcttactttattagaatcatacaaaataaatataagttgaaaaagcaatgacatgaaacatttatatttgaagggcttgttgttgttgttgctgtaattgtaagaaaatttacaccaaaaagaacttcatctatcctaggtaatttagatcactccaaattctattctgatctttcttattaaacatacctctatatttacgcatgtgtaatcagtaatcatgtaactgttgtctttgagatttccttaagagattttagcaggagctccaaaaggttcaagtttggctgcagaacatggggcatttttatgtagatgtggattgtgattctcagtaccaatggcttctccctgctatgtctgctttcccgcctcccatttgtcaagatataaactgcacagtcagggctgaaggagctacaaaagttaaacaatgtgtgtaaatgaagataagaattctgcatgagagcaagggttagaagaggaagctaagaaggacagaaaaagagattgactcaatgttgtgtaaaaatagagaccaagagggctcaaaggaaggtgataagaaaattaaattagaaaaagccaggaagataaaggaagttcaaaatatccataaatagccaaatgaataagaaatacaaagaaaatactaagaagcagtaaaggatagtaacaataagggaaaaaagaaatgtgtagcaagggaaagaaatagtaaaaaaggataaacagtgatacagcatgaaaagagaaaatgaaaaaagactgtaaatacagaagagagaaaataacaagatgatcatgtgcacatacaaacacagtgagatgcgataaggagagaaataacagaaactcatctattggcagaaagatggcctcccaaagatgtccacacacccatccctggaacctgtgaatattttgactgacatggtaataggaacactgcagatatgattaagtgtatagaccttgagaaggagaaattatcctggattatccaggtaaaaccaatctaatcccatgaacctttaaaagtgagactcttccagttggagtctgtcaaagggaaatggaagaaaagcacaaaggcacagggagatgcaacactgttgactttcaagatggaagaagggcacaaaagccaatgaatgagggcagcttctattaataggagctcaaaaggcagggatctgcccctggagcctcccaaaggaaccctgctgacaccttgattttagcctagtgagatctgtgtcagaattctagtctacagaactagaatataatacttttgtagtattttaagacactaagtttgtggtcatttattattgcatcaatagaagactaatgcttatgagatcacaaattattacagcaaaatgcttattttgtgcagcacaattgttaaaatcatgcttggttgtcattttacagcatacaaagccctttcccatatattgtcaggtctgatcattctaagacctgtggaatataagcaaagaccatcaattctacccctcctgatgagacaaggggggcccagagaggtaccatgtccaaggtcttggtactaaatgttacaattaaggacagaatgagctctccaagacctcagtttgcttccatagtaaaaccatgattgccagcaagacattcacatctaataaactcaagagcacaattaaagtaatttgcctggttcaatactctggtgctttgatggcctgcagagcaaaattcttccagtgtgagtcccatacctcatgcttcaacttgcacactccaaatgatcaatccctctgttaaatggaatgggattcattgtttccttgttgttctgctttcccagaaaggtaagctctttttccaaccagtgcccagcatagtgcttggcacaaaatggatcccaaagttttgtgttaatttaattgaatcaagaacacagaaacgtgatgctaaatgaaagaagccagtcacaaaggaccacatcttgtatgatttcattcctatgaaatgcctagaataggcaaatctatagaggcagaaagcagattagtgtttgcaagggctggtgggtgatggggaaaatagggtgtgactgctaatgggtatggagtttcctttggagtgatgaaaatattttaaaatttattgtggtaatggatgcacaactagaggaatgtactaaaagccgttgagttgtacactttaaatcagttaattgtatggtatgtgaatcagagctcaataatgctattaaattttttaaaaagattatatcaatttcctcatttgccccatattgtgcttaaaatccagaagacttatttcaatgtcacctttgattagtcccctcgtgagcgggattttagtagtagaatttgctaccattcattcgttgccaacattcaaatgaggctgagggtttacgacagtgagagagataggtccaggacagaaaaagtaagaaggatggcaactggaagggacagttgagaagtggagccaaggaactgatctgtgggcccaaacacaggacatagatctcagatctaggaaaagagggtttctggccaagatgaaagggactgttttcatgatggatacaagcagcacgtcattgttactcactgacagtctgggccaggatggggaagaagggctcttccctgcatctacatggagtaccactggcatggacacagtggtggctctaggctgtgtggcacatgtgggcaccccaatggttcgctgcgtatagtgtcatctgagaaagaagaggaggatgctacctgtacttgacaggatgagtttgggtattcaaatgaaaacagccccctccagggactatggaacataactggtggggattttcattgtttctttgtttaacagctttattgatatatatttcacatatcataaaattcaacaatttcaagcatgcaattcaatgacatttagaaaatttaccaagtggtgctaccatcaccataaaccagttttagaacactttcttcatcccaataagatccttcatggacatggttacttttaataagaactctctcattaaatatcaagtgtgatcaggagagaaacatgggtttcatcaatagataactggaatattttttctttctcaaaaattcttccataactatcctttccattcccgaagaccatcctctgcttcagagcttcatgactccagttccataatactacaaaagtctcacaggtaatatgtctagggacagccaaaccattccttctaactcatggttgtatttaccttcctaaaatccctgttccatcattccattatctcttcctattgcatcacttacaaacacttaagacttgggtaccattattgtttggccactaatcactttgtcttagttgaagacctggcaccagattatttctatggcactttcacacaatactatgattcttttggctggcttttaaactcctctataatttgagtcagcactctctatccagttttatttttgattatttctcaataagcgtgttctacttcactcaagccaactttctcgtgatccaacatgttgatagacccttctcttcacggttttatcaatactattatctttacttggaaaattcttttcttctctactcatgtgtatcagtcagctattgctgtgtaataacctactcggaagctggagagtggttgatcctgaatggactagctcatgcatctgcagggggctgtgctctaggctgggcttgggtggagttgcttagctatgcagctctacgccacatgtctctcattcctctccagcaatccggctcagacatgtccttctcatggccatggcagaagcacaagtggacaagtgtgaacaagaaaggtctcttgaggtctaggattacaacaggtatgctatcacttctccatgtccctattggccaaagccagtcaaaaggctgactccagagtcagagttagagggcactgtcatgttacctaaagagcatgtatacagggatgagtggaacactgggtccatcaatacatgctaccacactatccaaatccttcagatggatttcttggtcactgttgtatttggcataggaaaagaaagtattccagaaactactggaacctttcaaagatgacaatgagggatctacaaacaaattaggttttgaagagctggaatactatgaactcacataaaaataagtatcatcaggtttaacaaacaaaatcctttaataacaaatagcaatatttatatcttcagtccctgaaaaagtatgatagaaatggctccacttattcatgtgtctgttgtttagggcttgaactgtccagaacataatctttaatctggaagtaaccccaaagctttctcatgaaatttcttcttgagataggggagctctgagatcatcctctggccagagttgattaaggtacttaatgaacttgattgcctggtttcctgtgtcagccttaaattctactcttagttatagccaagcagtaggaatctatgaggtgggatggaggacagtgacgtacaaactacctaaacacagatgttttatctgacatttttatcctttacaatacatccttgcctataatgtatgccccacaaaaatcacataaaataccaagtgatgagcaattattgaagagagacccatataaaaataattatttcactggctctcagaagacaatttgtgattagaaaaatgcacaaatagagaagattacttatttgggccagtaaatacgaaactcaatgtaatttctaatttagaattctgtggctctccaaaatgggttttacctaattcaatttaaggtttaattttagataatcaaaccccaaaccaagcctgtgtatatgttgacatcttttgaacctagactaagtctccgagacttcccttcttaagtagagaaaataagagaaaaagaaccttcctagattttcagctgggtgtggttcctggatttgtaattgcactgatttccccatgagtcacatttgttcctagtgtacgccagactttccccttttagatgcttgaggagatacttctatgcgacaacggaacactgaaagtggtgaggaaaccatacgattgtgtctagctcaatagacacagaatgatctgttgttttagagcagagcttctctcccttgagtgtgcaagaagaacttgggggcttgtagaaacacacgttcctgagctccaaccatggagtttctggttcactgggtctgggacagggctcgtgattctgcatttctaacaagctcccacgtgttgcagatgctgctgttccgtggaatacattttgagtagcactggttaggagtacagtttctcagctttggcactactgacatctggaccaagtaattctctgttgtgggggctgcactgtgcattacaggatgttgaggagcatccttggcctctaccgactagtagcacctctccaggtatgacaaccaaaaatgtttccagacattgccaagtgtcctctgggagtcaaatcacccccattgagaactactggcttaaaggatgggttctgaataaaagagacatgagctgaaatctgccctaaccatttgactacgcatgtggttcaggggagcagtgtccacatggctaaagcttcggtatgagtatgcctccctcacagagttgttgtagggacaggttaagtgaggatgtatttaatcaagtggcatggggcctggccccaaagcagcagtccatagcggttcctgagtattgtatcaaaaaatctttctatgaggcaatatcatccaaactctgtttggaaggtaagcagagttacctacctagaagggtaagtttccgtctacttagttcaagtgtgtgcgttatatttagaattctagagtcttttctcagttcagaggcaataacaataaaataaacccaatatctatctctatgatcatgaagcttaaaatctagttccatggctaatacaccgagcatatttttatgatcctgaaataatctttatttgaaacatagatgtgtttttcaagtggtttctgaagcaaaatgctttgtcagtttgtcaaatccctttcatcccaacgaccatagaagatataaaccagttgttgtccaaagaacaaaagtaaccaagggggctgagataaaaatctcaggcaacactggtgaaaagggtaaagctgtatttacatatctcgtaccctatcaatacactcccataaggagcactagtgttagtttttccttttgccaccagggggagaaccaaactttctcacagagtcacacatatttgtcagacgtgcgttacagaggctggcagaccagggttgaacaaagcttttagttacttcctaccagaataaaaatatctgctggcatgaattcacgagagaaggcagtacgaaccacttttgtatacaaggtcttttaagcttttttattccaaacactgcagcaacaactatttttgatcctgggagtcaagagacgacaaagttaactatctctgggtcttcttactttctttacatttaagatgaggcattaggaataagacaagtaacattaatgttacataagacataaatgtacatttggctccctttagcttcctcaagcctagtattaaaggatgatgacaatggtgatgatgacagtggtggtgattgtaatgttgttggttgtggtagtgatggcagtaatgatgacaaagatgataatggtgatggaaattttagctaaacataatgaacacctaccaccataggatagatcctgggctaagcaacttatattagtagctaattaaactctaggaggaaaacatggagctttcttcatttacttattaaaattttaaagttagaggaagtttgggcatcctgatcactcccagaaacctttgaaccccccaccacaggaaaagataaataagtaaatagatagatataaaggttattggtaattgttatattaataataattaaataaagagtgtttttatgctcagatacaattccacagagctgtatttgtgaaggctggctcttcatgtgataaactattggcctattttcattgttgtcccaataaaataaggcaagaatacacatagtatatggatcctgccatgtactcagaattttttcttattacaatccactctttataattttgtctatcgttgcaacttttttacaatgagtgcatgttacatataaaataataatgcagcttcgtcatcttagaataaacaaaaggtgtagatcccccaaaattacccagaataaatatcacctgcatgtctgagtctgaaacatgggcacttgtgttgattaaactgtctcctaaatcactacagattcactgagtttttgcccaaacaaatcaaagtaccaaggaaaccaaaaaacaacaacaaaattacaaatgaaaattcatctgtaatgaaagtcagaaacaacgaggtcaaagcagcttatacggacatcaaatttcacttggctttgtctgttagaaatttacctcaatggagaagtggatgtggcatctctagtcacatttttagtgatgataattattatttggtggatgaatacacaaactccacattatttattagatacgttacttcctcttggctaaaatcactttggggcttaagccaaagccttccctacataaatgacatcaatcagattggcatttaccagaacattccaaaatcaataaggcgtgtatttttaagagccttttttgctatctttagatcggcaaatgaaggagttctgaagaaccaggagtgggagttccacaaataaacagcatgcttcatggttcattgtggagaaaaatctggaaactctcaaggggattttattgctgatctgaagtgacttgacgaaactcaggatcccaaatgagggaaatcctttgatagtaagagtttgcctaatatcttctcagagtgaattctaaaattaagagttaggtctaagattaagtcagaaaacactgcaaaagggactgccttcttaagatatgcccccttctctctcccatcactttccctacaaaacaacccaggatgagggcaaaactcactaaaataacatttatgtgggttttatttttgagccttggcctgtggtctctgccattggtggctgtactgttctgactcaatttctgccccatatcctaaatctatagtctcaggtacaaattatcagcccatatgaggactgagagggtgacctgctcgtacatttctacctctttttaaaaggcaacaaaatacctacttcctctcatttcagaggaaaatccactttccacttcatgtataaaactcagttggctataacttatgaagaaataagctaaggagtgatgactcttcagaaaatatgagtactggagaacgaagaaattatcaaactataaaaggaaatagagtttgtgcctggaaaagacaacagggtgcttccccttgcctctcagaataaactagaaaataaatgaagtctatacacacagttttcctgattctcagttgaaatttgaaaggaaagtaaataaaagagtgacagaattttaatgcttgaaaaaaacacaaagaacaccatattgatttatagaaaaaaagaataaggataaaaaagtatctacaggatggacaatggggatgcacaaaaaccatgtgagagaattaagaatttcaatttcagataagatcatggatccaagatctacctactatgaatgctcttgtaaaacaacacgatgtgcccccgggtagccaagattttggtctctaaaactttcaactaaaaagtgaaagacacagggatccttgaaaagtagttgattccatgtcttgtggcaggaaaaaccaggatgagtctggaacactttgttgttaccaagaagcttgaatactttcaagggtggtgctaactggacaaatggaccagcttaatgcagttgtcactaatgaaagcatgacagtttaatcaacaacaaaaaactctgtgaaaagtcatgagaacacatatactcaaaaacaacaaataacataatctgctcaagaaagatgtgcatgacttcccccaggaatatttactggaaatacttcacattgatgaacccaaacacatgcttgtcaaattcaagttttgctaagttccaggaggtcaaagtagacaatacaatgttgcatagggtgtttcaaattgggtagagaatgcagaatgatggttctcaaccttggctacacaggaaaatcacttgagaaaatttaaaaaatatcaatgactgggcactatccccagacaaattaaatcagaatctctggaggtggggcttggggcctggtatgtttgaaaagttccccagaccattctagtgggggtggagaaccactggcctagaatctaggataaccagtcatcctggacactttcctggttttagcgctgaaaagttcccatgtcccagcaaaccctccagtcctggaaaaacaaggatgattggtcaccctctccaatcaggcaataaaaagttgtcacagaaattttcaataaaaattacataagaaaacactgtaagaaaattaagtataaatgaccatgattcaccagactacaagaaaaggttgaagcttagaaattcttactactgtataaatgactatagcacaataaaggcccagtgggattgaggaatcagaatggcaaaccctagttcttggtgtcttggtccaaaatctctgactgaaaacccccaatttataaatttgaagtcacattctcaaccaataactgtatctatcatttctgttttccttatttgggtcagtaaccttgcaactctgagaagtatactaatactaatataattctaagaccaaggctaattctatgctaatagtgctggtgctggtactaataatgatgatagctctagcattaacactattatgaatactaatgataatgctgctaccagtattaatactaatcaggtactagtagtaatattgataaaatacatggggcaaatgaagaaattaatcaaactttggtattaatacaattgagttgagtgtaaaaataacttctggaatcaacatgttaggatatgcaagttttatttgttctttgaggtgtttgaattgttttggagaatctgacatatcgaacttatgattttaactaaaatacttgggacttaatgatttaagtttgcaatctctgtttaagtgtttgaggaaatctgatgagttaaatctagaagtttaaattttgtaaggaatatttagatgctcagtaaaaaattaagtgctagatttgaaagtctcactagctggtatttaagggatcaaaagaaaggtgttgtgttttgttttgtttttaaacattaatgcaaaaatgataaaaaaatgagatatataaattgggcttaaaggcttaaaaaaggtgtttttaaaagactagcttgatatactagtattacacaaagtgagagtcaacgttaatattcttgtacaagtgaacccacaagcaaaagctaaggctttaaaaaaatacaagtggtgtgatgtttctggaacagctgtggaagtgtgatctcagagaacacaagaagacagcaaagacaattcctgagaaattagaagggaaaggacagagcaggcacagcaaatctagcctcaagtctcagtgaaaaggcccaaaggggccaaacactttgctgagttgtgggaagctcccctgccaaatctctggaacgaacctgagatgcctttttgcaatgactcagatactagaattgaaagaatgtgacgtaagttttagcaatggggcaatttatgatttattttagaagaactaactgaggaaacaagatgaaagttgctggtagggcttagcagaaatgctctcaagcaagccaaggataaagatctttgcaatattacttagaagtccaaaggttgctagagaccacggagttcagggagaggccagcagctacagggctggaaggcaggtgagcctgtcttgtgggaaggggagaggtgaatctagacgtgacgagatgcctgaggcctaggatggtttgcctggcccagatccaccggccataataggaacctgggagcccaacagacatgaggtgtcacatttaaacgcttaggtggggcaaacagggccataagaacatacatttttaaataagacacaaaccaaatacacgggtctgaagttataaagcacagaaaacttactttcccagcatcttgaaacacacctaattcacaaaacgtgagcatgtcatctaaggatggaaacatgaataaaaaagagcacaaagaaaagaaagaaaattaaactataaatagcagtaaggaaaaagaaatagaggcaagtgatggtggtaaacatagacaggaactgcgtataatgatttgctggcaaaggaagaaatacccgcttaaaaaccatatatattttttaaggtggactgaggttaacagttgaaataaaggcagcagttgaaaggaaggcagcagctgaaagaaggtcatggattaagtagactgatccagcagtttccacgccaagtccaagtctgaacaaaggaaaaacacttggaaaaaatcatttggttaaaaataataacaagggataggcagaagagtttgaccaggatgttgcagacaggaagaaagcaggctacagggaaatgtgggaaagtgatcaatgaaggagaaaggcagcaaagccctatctacctacatcagtgggtgtcaaccctgactgcactctagaattacctggggagctctacaaaatacctatgcaccaccctcgaccactgagctggaatctctggggcttggggattgggtatgaagtttctaaagctcccaggtgatctcaatttgcagctagggctgagacccactgctttgcatgcagagagagtaaatgtgaggtcccatatctctaaattatcaggcccaaacagccacttgcacctgaagcactccaataattgtagccaaagtcatttccttatttgaacttcgcaggtaaatgactagatttttcacttgacttaaggagctttaaaattcagaaggaagaaaggaagaaatttttttattatcctttaagttttagagtacatgtgcgcaacgtgcaagtttgttacatatgtatacatgtgccatgttggtgtgctgcccccattaactagtcatttaacattaggtatatctcctaatgctatccctccccgcttcccccaccccacaacaggccccggtgtgtgatgttccccttcctgtgtccatgtgttcttattgttcaattcccacctatgagtgagaacatgcggtgtttggttttttgtccttgcgatagtttgctcagaatgatggtttccagcttcatccatgtccctacaaaggacatgaactcattgttttttatggctgcatagtatttcatggtgtatatgtgccacattttcttaatccagtctatcattgttggacatttgggttggttccaagtctttgctattgtgaatagtgctgcaataaacatacgtgtgcatgtgtctttataacagcatgatttataatcctttgggtatatacccagtaatgcaatggctgggtcaaatggtatttcaagttctagatccctgaggaatcaacacactgacttccacaatggttgaactagtttacagtcccaccaacagtgtaaaagtgttcctatttctccacagcctctccagcacctgttgtttcctgactttttaatgatcaccgttctaactggtgtgagatggtatctcattgtggttttgatttgcatttctctgatggccagtgatgatgagcattttttcatgtgtcttttggctgcataaatgtcttcttttgagaagtgtctgttcatatccttcacccacttgttgatggggttgtttgtttttttcttgtaaatttgtttgtgttcattgtagattctggatattagccctttgtcagatgagtagattgcaaaaattttctcccgttttgtaggttgcctgttcactctgatggtattttctcttgctgtgcagaagctctttagtttaattagatcccatttgtcaattttggcttttgttgccattgcttttggtgttttagacatgaagtccttgcccatgcctatgtcctgaatggtaatgcctaggttttcttctagggtttttatggttttaggtctaacgtttaagtctttaacccatcttgaattgatttttgtataaggtgtaaggaaaggatccagtttcagctttctacatataaaattttctcaactaaactcagaaaaggaagtggggaaatatgtttgggtggcttgtaaactatcaattattttacatatttgaaaccatctttaaatagaaatccagtgtaccattggtcttcacactgaaaacaattcactcagccacaaaataaaagctagcaacacggagataagaatgtcttatttaggtcacaaaatgcctacagattctttttctgttttcatctctactgatcagtgattctcaactgggggcagttttgcacccttaggggacatttggcaatatttcagacattttttattgtcatgattggcagcttgttattggaatctaccggggatcgaccagggacactgctaaacactctacaacgcatgacaaatcccttaaagtaaagaattatccagtccaaaatatcaatgtgctgaggcagaaagatcctgctctagatagtaaggttaacatttctgcaaataataactaatactctctataataactctctattgatactctctactaataactgcctttcaaccgaaacacaaataagtttaaacatgcaccaattatatgctgaattaaagaaaaacaaaaaagcctcttacagaaaatcaaagcactaataaaattatcctgtgggtttaccacaatgagagatcaaggactggagaattaaaacattggccaaccaagtgaagttgctaaagcaaaaaccagatatcaaattattttgattgttggaattgagtttacactcagacaaattgagagtcctctaaatgaagacttctgagcatgcgttatcatcaatatttagtaaattatgcttaaaatatctgtgtttgctaaattttacatgtcctaaataatacatttgtaggggaaaaaaaggcttttcaagctatacaattatataaatttcttccaaatcacttggtaaatttgctcacttcatggaaaacaaaacagaggtgggataggaagatatttttcagaattgcaatgcaaatacagtgagaaataatatcacccccaaacatgagaaagtcggtgtggttagagctgaaggaagacaaggaaaacttatcatgcatcccagtctctgatctgtgataacagtaatgttaaccactagtctagttctaatgggaactagaagtctattctagagaaagatttacaaattattaagagtattcattaaaagccacaaaacatgcctatgtcctgaatggtattgcctagcttttcttctagggtttttatggttttaggtctaacatttaagtctttaatccatcttgaattaatttttgtataaggtataaggaaggaaaccagtttcagctttctacatatggctagccaattttcccagcaccatttattaaatagggaatactttccccatttcttgtttttgtcaggtttgtcaaagatcagatggttgtagatgtgtggtattatttctgagggctctgttctgttccattggtctatatctctgttttggtaccagtaccatgctgttttggttactgtagccttgtagtatagtttgaagtcaggtagcatgatgcctccaggtaggcaataccattcaggacataggcatgggcaaggacttcatgtctaaaacaccaaaagcaatggcaacaaaagccaaaattgacaaatgggatctaattaaactaaagagcttctgcacagcaaaagaaactaccatcagagtgaacaggcaacctacaaaatgggagaaaatttttgcaatctactcatctgacaaagggctaatatccagaatctacaatgaactcaaacaaatttacaagaaaaaaacaaacaaccccatcaaaaagtgggcaaaggatatgaacaggcacttctcaaaagaagacatttatgcagccaatacacacatgacaaaatgctcatcatcactggccatcagagaaatgcaaatcaaaaccacagtgagataccatctcacaccagttacaatggcgatcattcaaatgtcaggaaacaacaggtgctggagaggctgtggagaaataggaacacttttacactgttggtgggactgtaaactagttcaaccattgtggaagacagtgtggtgattcctcagggatctagaactagaaataccatttgacccagacatcgcattactgggtatatacccaaaggattctaaatcatgctgctatgaagacacatgcacacgtatgtttattgtggcactattcacaatagcaaagacttggaaccaacccaaatgtccaacaatgatagactggattaagaaaatgtggcacatatacaccatgaaatactatgcagccatgaaaaacgatgagttcatgtcctttgtagggacatggatgaagccggaaaccatcattgtgagcaaactattgcaaggacaaaaaaccaaacaccacatgttctcactcataggtgggaattgaacaatgagaacacatggacacaggaaggggaacatcacacaccggggcctgttgtggggtgggcagaggagggagggatagcattaggatatatacctaatgtaaataactagttaatggggtcagcacagaaacatggcacatgtatacatatgtaacaaacctgcacgttgtgcacatgtaccctagaacttaaagtatgattaaaaaaagaaaagaaaagaaaaaaaaaagccagaaaactttaaaacataactggtactctcaaacaagcaatttaaataattgatgaatcccatttccacgtgcttgatagtcatcagtgattgagggcctgtgagtgagaacaatcaagtcagtggtcttcaagttttgctgtacgttctcatcagttggagattacaagctttctttttcttttttaaaatgatgccaaggcaggcttcttcccagaccaaataaatcagaagctctaggagtgaagcttgatctttggcacagtattgtacagcacatctcaaactttaactttcatgtagattgcctagggatcttcgtaaaatgcagattctaattgagtgggtctggggtgtgcctgagattctgcattttgcaatgtcaacagtggtgttctaaggaacacacttggaatagtgaggtgtcaaaagcttcctgtttgattctaatgtgcagccagcattgagaactgtctatgactaagctcctagttgtaagctgggtgctatgtgggcacagaagtaaaatagaaaaagaagcattcctcaaataaggaattgttccatcctaaatcactgtcatgcaattcacatatctttggcttatcttttgcaagaaaaaagggtcaaattttctaatgggaagaaattccattgtagaccaaaggaagctcagttactcctctggaaggacagcccatttgatgttatcttatattaatacaggtaacttgccccagccttagcttttgcgtttccttttctggaaggctctttcagcagagttctgcatggctgtttcctgttcatcattccagcctcctcctatgtaccattcccaaccccaccccatcactctcatttccttatcctgggtttttcaccagctgtttatcacgagttaattaatcaataacaataaatggccagtgagctcaaagaaacccacaaccattcccatgccctgctgaaacatgaatgaagcctgaatattggttagtactattggtcttgggagagagaaatcctaaaaggaagaaaaataatgaccttattaaaaaatcacactggctagcattttggaggaggctttacatttatagcttaatctcaaattgattgtctcatttgatgcctatgaaaaactcatagggtggggattttccccattctcaaggtaggaaaactgagtttttgagatgccaaagagcacaaaatcacagaaggaagaatcaaaggcaggcatctgaattcaaagtctaagttctttcaacttctcctagctgacttctttattttttcaacacactcttaagaatcaacaaccaagtcctaagactgtacatacatttgaacttgatattaagtaaatttaacccaccagtatctaaaatgggaaataagagatacaaggcaagtcacgttggtgtgtttgtcccaaccctacaccctactttctccatgtgatttttaatgggggccctttctatttactgaattacaagaaggatatcctgaaaaagacactatcaaattcaggaaatagtcagttagtttgtattactgagtatttataaagcagtattattttcttatttaaagaaaatggaagttttaattattatttattccaaagattataaaaggtgaataataagtgatttaagagagtatatgataatgattacaaatctattcaagagcaatttaagttttttagtctttaatttttcctatttaaaaaagtaatacttttttaaagaaaacaaacaaaagcaaaaaccaaaaacagcagaaatatactgtgaaaagaagaaatctcctatagttcctccccctgaagaaagccattgtaagtaataatgataataataatataactaacatttgttgagtgtagtaaaggccacacactgtgctattaatttgttaaaattttctatggatataacaaaatatatgcatagacattatgttattaatataacttgcatcatattatatgatgtgttctattctgttgtgatacactagcaaatggtagtacatatctgtacataacagaatcatcactcatcattgtagaaatgtttacatttagtaacatttgttgtactaagcactgtgttcaatgcattacctgacttatttaattctgtcaatgattctctgaggtagtgtgtagtattatttcataatctaggaaatcaagtattggagagatttaatagcttattttaggacatggctttgagaggcagagctaggatttccactgagagctgtctcagcccagagcctgaattcttatcaatggtatttttaacttgttttaatactgagaaaaatattttttaaatattgatgaacattaactcaaaaaagcgtctttagaactgctacaatatgtttgcaatttagtagtaattccagaaagtgtgcttggtagtaattgaactcaaatattaagttcacttacaccctcataaatagcttaaagtttctcagaaggtagggtgagtagttgatccagaaggtgccaaaatgataagcgttataagccaaaaatggacttcctgtagaatgcaatggggctacctttccattctcaatgaaaatttcagcaaaaataaatgtgcactcacagataagtagataagcattatttgtcctacaccaacctcacatatcctataaatcttagcgtaaagttgtgcattgacctgctgcaacatgaatgagcctcaaagacataatactgagtgaaagaagtcaatcacaaaagaccacatgtcatgttgtatggttccattcatatgaaatgtccatagaaggcaaagctgttccaatagaaagtagattagtgggtacctggggctgggggtgggaacagggaatgactgcaaatggggatgaacaatttcattgggatgatggaaatattctaaacagattgtgggaatgttgcacaactctgtaaatttattaagaaaccactgaattgcacacttaaactgagtaaattttatgatgtaaaattacttcaataaagttattttaaaaatatatctcaataagagaaccagaaattacttgcaagtgaaggattaaaattaatcttatacattcaaaataagtgagtaacattataatgtatcattttccttcctaggacacccatttagaaaaatcacaatataatgaatgaaaataaacatcatttttttgttactacttatttagtatttatagtgatctgaccaagcatccatctgtggttaatatagaaacagcccactgatctacacaccagacttctaagaaattcagctttctaaaatcagaagcaaaaaaggcatctgaacaactatcaggattggctacataatttatggagccctgatcaaaatgaaaatgcaggacctcttgctcagattaataattttaaaatgatgacagcagaacattagtcatgttgtccttctgagcatgggccctgtgcgaccacacaggtaggatactcataaagctggtgttggcaatcaaactagttgtcacaaaaattctggactaaggccatgcattttattcaagaggtttattctgtaacagaagtcctctaactctcattttattctacatgcacatttatggacttggttatctcatttgatggactaagggcaatcaaaatcaacacataagaactgagtggaagatttcagaaggaagaagccctcttctgaagggaaaagtgaagaaacactaagaagctaacccagcaatatgaagtataataatgggaccaggaaatagtaaatttttctattacaccctgtttgcaaagacagcaacatctaatacattttagaaaatattcatcaaaaaacaaaaaggaaggactcaatggggcagcagtgtgctgataaaacatttaacaactggttctctggaggaaagctctgatttgcgccatttgttaatttccataatataaatactcattgtggcggattccagggtaccaaggtgaggacacaggacatgcagttaggaagagatgcacacaactggttctccagccaacgcaagctggctccagcatactgctgaaatggggaaaacattaggtactaccggcagtgaaaatataagacaggcccggggcacaggaggagaaataaaattcagttctgttcccttataaaacattttgttccaagggttagcaaagagagaaggtgactgttgctatttgctaaaataagatactaattctaatggcaaaatcatcttggataatcaaaaattgactacataactatttcccttgtcactttccttccaaaaataattatctctgaataatttcaaggttaaagattgtaagcctaaagagcaaccgactgtaaaaacaactgaaaactatgccagtgatatggcttttaaaaaaatagtaatatttgtttttaaaaaagagagcatggccaagtaaaaatattttctcttttctgttccaatggtttaacctatgaatcaccctctaggagtactatcataccacagataggcaactcttactctttacagcaaaagcataagtcttcactatcagttttagttgcttccaatagaaaggagagtatatgtgatattaaaatgtaaacatttcaaatcaccataggctaccttgagaatccctgattcaaaagacctctctcaccctcaggaacactttaaaatttcttcagagtcaagcagtcaacggcattctggctcagggcatgataccacagaagacacttccctgatggtctcttaggtggcagccatattactcacccagcatgcctggtgtttcctaaatcccttttcaattgcccttcttacacccagaagcatcaaagagaggtctggggatgactgctccctcttactgtagcaactctctcctccagagagggcaggggttaaagttatcttttttaaattatctaataaaaccgtagttgatcaacatattttttccaaaagtatttacggagtgcttattacatccaagcactgttctaggactcataattttgatatttttgctaggtaccagtccaattctgacagtacttagaaggcaaggtaacatactgtgcacatgcaagcctgtttaaaaacagttctggaatgaatgccaagatgagagacgctgacttacattagggaagcctatacaactgattatcctcattacctctgtttaacataagctcagacttttttttaaaaaaatctcagaacctatatggacattatcagttttaatctagtgtcttttttgcctttataactttctagtatgagcgcatagaatatcctacttaatgagagatcctctaggcatggaggcctagagatttggtaacactaattattttggttaaaacatatacacacacaaacacacacatgtgcacacacaccctaaatgggatccatctttgggaggccaagtagatgagtataggtttcccattcttgggagtagatggtatcattactagcaactgttgtgagatgcccctgcctgtaagaactgcgacaagaaactccttttgatggaagttgcccccaaagcagaaaggtcagaatcaggctgcaaagctgtggacatgtcagggtcttcagatctctctcctacaaggcatccttactatctggagatagatggaaattattgatctttcaacatcctcttcaccaagaagaaagaataataacctccaagaatattagtagcactgtacttcctgaaagtctgagaagaattattacccaagacatggaagcacatgggaaagggtagcctgcaaggggctaagcatttatgtgtgtgtataacatatgcatatatatgtgtatgtatatcaaagacagcatgactatacataatatgaagatgtaatataatatatattatctataatgtataatgtatggtatagataatccattatatataccatcaaacaggtaggtgacaatgtatattttatctctcacatttaatttcattgctctcctaagctgtatgaaaatatcctgcaagctgaacatggtgactcacgcctgttttcctagaactttgggaggccaaagtgggcggatcacttgcgcccaggatgagaccaacccaggcaacatggtgagaccccatctctacaaaaaatacaaacacaaaaaattagccaggtgtagtggcacacacatgtagttctaggcactcaggaggctgaggtgggaggatcaactgagcccagggaggtcgaagctgcagtgagccaaggtcacaccactgcactccagcctgggcaacagagcaagactctgtctcaaaacaaaaatgaaaacaaaaacgaaaacaaaaacaaaacctgcagccaagttgcctctgaaacctagaatgatgtcagaccaacagattccccacattgatagtaactaattaaatcactgctttctttgagataaagactagaacaggcactctttactctggggcaggcctactccactttggaaaaggtgccaaatctcatgggcttacactacctggtgaccttacacaagttactgaaactctcaggttccttatctgtaaaatggggataataattgtatatgtttcctagggttgttatgaagattaaagaagtatttgtaaaaattctaaaccagtgcctgttaaatagtaaggactgcgtaagtgctataaaaaaaaaaaaaaaaaaaaagaaaccgtgggagtatcttattgttttctaatgtttgcagagggagtaagagttttactcatctatatataatatgagcacataactcattctcagtttgatttttccttaacacaaacaagcctcttttcagagtttaaacaaatcacaaaagaatttttaagtcattgttaaaattgacatgatttataagctggaatgaaagtgccattcttgtcccttaaatgcatgaggtgatcaatacgttttttcctagatataagaaattcctttaggtacctgctttggcatggctggcatagacatatttatattaggtaattaagaactcagatgaaaacaatttgatactattgttaagcacaatatgttttaattattatagtcataattatataattatacctttatatatagtataacaatgcattcttttctacagtttgcagtttgattccttttatccttgatgtcatttaggaattctaaatgtcctaatttctccaaaacactgaatgagagttgcagaaagacaaacataaaaccagattaactgcaggtgaaaatggcatgtggataatttatttctgaatccagaggaattacatttttgatgctttgtctctccttagcctagagtctcaagaagcttttatacatacaagtcaacagattaacattcgtgatgattcactgtttcaaaataacttacatggtacatccaaagttactgctagaaatattgctggcattgatttctttaagcacatttaaacacaaaagcccaacagaaaaatcagagcttctacatttggactaaaaagaggacacacacagagatctgttcctctctaatagaatgtattaaatagtagacttgagtggtgtttgtaagtatgacattgtgggagggaaactatatgaagcaaaggctataccttgaataggctgttattactgcacccatcaccccaaaacaggccagtgtgattttatgtgcctcccccacaaaatagagcttcttaattaaagccttagcacttaccagttcctgccacacaataagcaatcaaaaaaaaaaaaaaaaaaaaaaaccactggcttaaataaagaccaaataaatggatcattgtcctaagtagcttacagtctaatttgggaggtgagactaatttgggatgtgggataatcaatcctgaggacaaatagtgacatcaacagacttgtgcagggtaaaatgtcaaagaggatatggagaaatctgaatccctgtattaagattggtgcaaaagtaattgcagtttttgccattgcttttaatcatcactgttacatcactggtgggaatgtaaaatggagcagccactttggaaaactgtctggcagctcttcaaaagtttaaacatagagctactatgtgacccagcaattccactcctagctatatttcatttcaagagaaacaaaaacacatgtacacacaaaaacttgcacataaatgttcacagcattattcataatagctaaaaagtggaaataacccaaatgtccatcagctgatgaatgaataaacaaaatgtggcgtacccatacaacgaaagattattcagccacaaaatgaaatcctgatacatgtacaacatagatgagccttgaaaacattatgctaagtgaaaggagacagttacaaaaggccatatattatatgattctatttttatgaaatatccataaaaggcaaatctatggggacagaaagtaattagtagttgccagaggtgttaaagggaaagggaggggtggttggctgctaatgaatgcagcaattctttatgaggtgatcaggatgttctagaacatgtggtgataaatgcacaattctgtgaatatactaaaaactactaaattgtacacttttaaaaaggggaattttatggtatgtgaactagacctcaatttcttaaaacatgcaaaagatgcatcactgcaggagttcagtggagaagtattaataaaatttggaagaccttagaggcttccagggggaggggataattgagctaggtcttcagggatgcattggatttaggtttaaggagggaaggcatttcatagaagagaaagaaggtgacgaagtgaagctggtcattgttccagtcatgaaaaaaaaaagaaccaacataccttgcaataatattgtcaatgaacgtgcccccccgcaccccgtccccccctggctaaaagcactgtcgtttacctctgcttcaggtggaatttacagttcaaggcagccaatatgcaaaccacctaagcctccattttcacagctgtggcttaccaatttctctttaaaacaccaacttttagatttctgtcccactcaattacattgaaagaaatcctagatatcctatctttcatccagaaatatttcagcattatactcttaatgtttgacattaacctagcatgaactatcactgtatgatactcatgctgtgactgtgccgtattgtatttgactttcccaatatttgggggtctgagtttcaagaaggacatgaatgtcaacttctagtcatgtaaatagaattaaaaactcctagtgctgtttatcttgataaggtttctatagtttactattaaatattagagttcaagcctccacttggaatcagatccattcaggagactgtatcatggtgttgcatagcagaattgctatttaagaataacattcttgtcacattcatccacattccaaaaatactctgcttggccttgatggcaggatctgagaagaagctggtcatggtgaacacaaagtttgggagagattcttgctgaaatatagctttgtgtgacaaaagaggaaaagcacgggattcctgggattggaagagcatccaaaagcagctaatccagcctcccgcccaatgaacaaattccctccgacgatgctattaggtaagtatcaccttgagttcaagtagtcacagctttatgtccaaccagctcatgactggacaatttttatctagacagtcctcatagcatggccaaagtcacaaatgatgaaagacataataaactctagaaaaatacataatatcaagaccatgtttcttaacctaggcactgtagacatttgggtctggataattctttgctgtaggggctgttctgtgccctgtaggatatttagtagcatctctgacctctacttgcttatacgccaatagcaccctccccaagatgtggcaagcaaatacacaaaaatgtctccagacattgccaaatgtcccttggtgggggagtaggggtgggggagggcaaaattgcccccagttgagagccacagggctagaggcattacatgttaagagctacaggagggaagctgtgacctaacggccattcatatgtacaggatattaggatacttacgacctgaacaaaaatatacccttcagtatccaacagtaagttatttgacattaccaaaactcagcaaatgtttgttagcttaaataaaaccatatgattgtatatatttcctgttttagaataagaataattcagtaaaaaggctagtgcattatgttttcattgcatacatatatacatataaataattgaaggagatctgataacatgttaaattttaaaattcagtggtgttattatttagtcagactttgtcccatcactgtccaataactttatgtacatcattctgcttaattctgactccatctctgaaagataggtctgctgactcaattatgatataatactaaggctcacaaataacttgctggaagtcatccaattagtagatacaagagttgggatttgaaaccatgcctgattccaaacacaaacccaaagtacaacattgcattgagatttaggatctgattcccaagttcttggccacaaaagtatgctgtacgtttgtctgtctcgttttaaagaattacaaatatgaacaaatgagaacaattcaaatatgtgtcaagtttttttcacccattttggttccaccttctttgaacattttcaaaacataaaagactgtgagtcagactttgagcctatgcctaatttaagcaagactttatatactagattaattaacaaaatagaagattgttctgctctcttgatctcacattgcaacaacccaggctttattgtacaggggtcacctcccttctagaatggctttatccacaactatgcttgtatagagaagtctacaagtcactagctctctgtgagtatcagctacaagacattgctctggcaacaccaaggcatgcttgcaatttaacaaactctgtaagtggaaggaaaaaagagccttccacctaaatgccaaatctatatgtttcacataggagtgatgtttgaaatatctatttcatttttgcctgccactcccctattctctcagagctctgttacataaagcattaggtgttctggggaataattgagcatcagttgtggcagagcgtaggaggatgcctaggttacctccattatcacacactctatttaggaggtgggcaaatcctatttatgtaactccagatgaagatacaccctagcaatttgggagggtgatcaccaaaataaataggtaatttcacttgaacaccttgtactaagcacaaatctgcttactgccttcatcttcttcgaaaggaacaggtgtcattgaaaacaatagtttgcgttggctgctcagtatgggaaagccaaggggttgaaattcaaagctgagtagaatacgggcagagaacagcagctgaattttactacgaaatgtgaaaacacagctctgtatcctccccacctgtgaagataagacatcctgactatttcagtgtgagaaaagttcagcaatcttggggtgctcagggctgggtgtaggtatgggggagagttagagatagttgatgtgaaaacttccccagtaggaaactgagtcaaatcagtcatcttttggttgctcattcagttctctaaagccctggtgtcaaatacgacagccactagccccaagtgaccaatgagtactggaaatgtggctagtcagaattaaaatgtgctgtaagtatgaaataaataatagtgcaaagacttggcatgacaaatgtgtatatctcgttaggaacttttctattgtttgcatattaaaataatatttcagatatattaggttaaataaaatatattactgtttctttttatttttaaacttatctaaatgtggctattataaaatttaaaattgcatatgtggcttggatttcatttctattggacaacactaatcaggctgaaagttactttaaggcatgatttatgctgagctcaaaggaaggcgcttccataggaaagtgttgcttgactgagcttggctccctatctcaaaatgttaacttcaaatatacttcaaaactgaaatttcattcactgccttcttggcaaaatctgttagataaacaaatcttctactctttgagacatgaaaaaggatggttaacaatgtaactaaactttcttcctttgcagacatacttaaaccacgttaaagcagagataaaacaggctctaacattgaaatgggctcataattaggtgctaatgttgaatatcctgtaatgtttcaaaaagacacagatgcagaaaggccaggtctgcacaaggcaagagagaaaacgttgcatttatgaatgcaaatatgttacagatatccaagttcaccagtctatgccttactgatacttcttgctttttggcatctcctctttaatttccaccacttaactgattcacacctgggtcagaggcaaagccgtcttcctcatctctctgatgagcctctccactctttgcatctcccattgctaatctgtcttgtccccctaccattgcaaatcatctcaacttttggcttaagaacctatgagagtagcaggcagcccaggatcgaggtcatccttgcatcaaagccttaaaatccgattctacataatccagccaagcaagagattccaaaggcaagcacgagaatcattaataatgaagtagtcttccaatctattcaagtcaatcctcagtctttttaatgcaacatttacattaaaacataaaaataatccctttgttttgcatttgtttaattcatttacaaattattccatataattagaactcaaagaaagtatcactgtctgccaacaggaaccaaattttcttttcagttcataagttttttaccctccaaaacctcatcttaaaaagttttgtgtttgtgggtggttataaatgtttttctaatctagagctcaaagaaaatgtggccaaaggatactgctttgggtaacctcaggaaggaagaatatctccaaaaatattaaaaataaaaaagcagatcatagctcttaaggcccagtatgctaaatcctcagcgagcctggatcatgtaggaacgagtaattctagataagcacacatcctggatagctcagggttaacattctaactatcttattgtaagagcttctatttctctaatggagacattttcatgtcttttaaaaccattgaacagtttgtcttataagcataattataggtgaaaatacagattaaataaagagctgattgaatctgtcatgatattaccacatgaagcaaatgtctgcaggcatccacactgacaatccattatgactgttatatcttttcaatatggcacccagcgtcctggtaggcctaatataaggggctgctggctgcccctccagcaaacgttagagcagttcctgactctacttcttcattgctgctctcttttccactgtcaacaggaagggcaaactgctgtccctctgttgattctcacttctaccaccacatggccatgggtgcccaccttgaggtcccaggtgaccccagtactgttgccactgtgatctctaccactctgctcctctttgctttctccatccttagttctcaaaatgagcttttcatgcacctatcaccactggggtggaatgtctttttccttctataagacaaatccatgacggaagacactgctgggtaaaaacacatctggatcccaattctacttttaaggagaatttcttttttctttctttttaaaaaaattactagtcattcctgcaggttggtatcctacaaatcaagggtttactgtatgattattacatatccataagaaaaaaatgacaatttaaaaaattttaatggcaagctctggcatattaattggaaatccttggttcttagtctaaacattgaattgttgtgtaatcaatttctagtcaaataatcaatttctacttcagtttcattaataattatgattaagtcagtagcaaaaaagcatgttatttctcctcgggaagatgtaagacagcttaacttaagggaccctaaatatggtctttgtaatcagtggacttgagtttacaacccaacttcaccacttatttttgtgactttggaaaagttacttagcctctacaagccccagtttcctcatctataaaatgatataaagaaacctattagagagttgtaaggaatttttttttagataggatctcactctgttgctcaggctggagtgcagtggcatgatcatcactgcagccacagcctccctcgctcaagtgatcctcccgcctcagcttcctgagtagctgggactgtaagtgtgccaccatgcccagctaatattttattttatttttagagacagggtcttgccatattgcccaggctggtctctaactcctgggcttaaatgatcctcctttctctcccaaagtgctgggattacaggcatgagctaccatgcccagccgagaattgtaaagattataaagtactcgcataagtcatcaaggaaaatgtatgacacagagtgggtactgggatgggggcggagattttgcccattgctgatcccctggcaacagactaaagaagactatactgagcctcagctaggaaaagcaatcctcaaatacttgacagcatgtaagaatgcacttttaaagataatgatcttttttcctttttagagattcatggtactgtttggcttacagcattccgcctgagcttgctgtaaactatacacacacacaccccacacacacactcacacacaatgtaaacacacacacatatgccactgccaccatgactatcagccagttaaacagattatggtacattcacccacaaatgtccatataaaaagcatcctagtatcctgtggttggccatcgtggttactcccagcatgttggccctgattaatgtgtgtgggatgtgtgcgtagggggtattgaaatatactgtatcccagtgtccagcgaaaggccagaccgtgttcacgtaaacagtcctgacatattctgtttcagtttcccatgacataaaataaactgtcacctacaaactgcaagtaaactgagaagattgttaagcacatatataacaaagaaacatctaaatagataaatggggagtttttttttttttaataagtaaatgtgcctagacagactattaccttacagtggaatagaccatgcatgtctagcattgcttggctttcttggttcattttttataactacattattgagatataattcacatactttacaactcacacatttcaggtgtttgattaaatggttttcagtatattcacagagttgtgcaaccatcaccacaaccaattttagaatatttttatcacctcaaaaagaaaccccatacccattattagtctctctgcattttatcccacccccagccctagggaaccaccaatctatattccatctccatggatttgcctattctggatatttcatgtaagtggaatcacaagagaatatgtgatctcttgtgtccagctcaagagagacttagcaccatgttttcaaggttcatccatgtgggagcgtgtgtcagtacttcattctttttcctattgaataatattctcttgtatggttgaccatattttgtttatctgttaatcagttaggatggattcttgggttttttccacttttttgttgttatgaataatgcatgtgcattcatgtataagttttttgtgtacacacatttcatttctcttgggtagataactaggagtggaattgctgagtcatatggtaactctatgcttaactttttgaggaactgacaggctgtttttcaaagtggctgcagcattttacattcccaccagtagtttatgagggttctaatttccctacatcctcaccaacacttattctttgtatttttttcatcattactatcctggtgggtgtaaagtggtatttccttgtggttttgatttccatatccctgactgctaaagattttgagcatgttttcatgttcttattggctaactgtatgtatgttccatgtgttcattggccatttggagttgaacggggaggaggtgtgggatgatattcaaaggaatagtgtaggaatcagatacaggaatgatatcctatagtccagtatttttttctttctgctggcacaatgaatgttctaaggaatttatgagtagctttttaatcttaagcctgggatttgtgagctaactataaatcacttaaccaaagcatgatgaaatgctattcaacaaaatgctgaaggaagcagtaagattaataactaaagacaacgtatgacttcaacactataacttaaaaaaaatcaaaacaacaaaaatagaactataagtcttctgtccattagtcaaaggtgttatcactggctcctaggtcacagattgagacctcagcctggttagtctgtcaagcagagttcactgaagtaaacgtgtgtaaggaggcagggagggggaagcggaatggaagagtttataacaaaaatcgcaaccagattctcaatgcatacagtgtggcaaacgttgtataagcctcacgggtgaactacaatattggttattcttgccacaagtctgccaggatttcttaaaaagttgttgctctcattggtggtttgcttgtctgtaacagagaagggcaacaaagttccttccatgtacacagtttcctcttgctctgtttaatagccacaagcagcttataagcataaaactctatccaggtacaacggaagcacccttagccatagctataataggcccagggagaggaggtgaccgatgcagcagttacccagtcaataggggtctatgaggaagcatgatggaagagttttcccagtatggacgctgctgcccaaattgagagttgtagaaattgccgttcagtgggtgccgggaacagacagaagcagatttaaaggcagtaggacgacaaagtagtcatccatgagttcttcctaccagagtttacaagatatctgagggtggcaatgctatgggtatcctggcaataaaagacctcctattctgagtgtccaaaaggctgtaacacaatttcatcacatctcttttttctaattgaggaaattgatcatcacacacacacacacatacacacacacacacacacgcacacacacacacgcatcctccaaccctcacactgcttaactgtttctataacttccccttactccaatatccttactctgtggcctgtaagtccctgccatttttcttgaccaccgcacccatctctccaaagctctgttctgctactgttccccttactccttcactcagtctgctactttcttcactcatttgcttgaacttgctatgccactttgctcctcagcatctttgcacaaactattccttcttttctatagtgttttccgtatgttaatccacctaataatcatcagcctgtaggtcttggcctagtcttcacttttaaagcataacagatataataactagggccaccgacacgtagatccacagcctgcaagaaatggggtggggggttgtctctggcttgcaccccatgattcactggatatctatgtcaagtgttcactcaggagcacaagcaggggcctgtggccacatgtcctctggcctctccaagtcttgctgccaagtgccagggctggaaaatggttgaagtggatgaccccctgccacttcctccaaggtgacactgtgaaggtggagcaggacatccatactcaggggacacagattctcaagcaaggagaggtggagggagccttttgtgtacactttactttgataatggatactgctggaatatgggcagactgcagtggactatttttaaagaaaaggatctggttttaaattcatatgtggttttgtgattttaaaaggaggactacaaaaaatactgttgtgaagcaaatgatcaccatctaatgtgcctcttgtttgttatacaaataaaagttataactaaaataaaacacttcacactggctaggatggctactatcaaatagacaaagctggatgtggtggcacatgcccatactcccagatgctcaaaagattgaggttggaggattcctcaaacccaggagttcaagaccagtctgggcaacatagcaagatgctgtctctaaacattactactaataataataacaacaacaagtactggtaaggatgtggagaaactggaaccctcaaacaccattgtgggaatgtaaaatgatgcaatcactttggagaacactctggcggctcctcaaatagttaaacatagagttcctataatgaccaagcaattctactcctagttatatacccacgagaagtgaaagcatacatccatacaaaacatatacacagaagtccatagcagcattattcataaaagcagaaaaactgaaaacaccacaaatgtccatcacttgatgaatgaataagcaaagtatcatgtttccatatgatgaaatattatatggtgataaaaaggaatgaagtactaatacatgctgcaacatgggtgaacctcgacaacacactcagtgaaaggagacagtcacaaaggaccacgtattgtatgattccatttatggaaaatctcaagaacaggcaaatctagagacaaaaagcaaattaatggttgtcaggggctcagagtagcattggtggaggagataaaaagagagtgactgccagtggcatggagtttcttttggggaaacaaaaatattctaaaattagctagtggtgatggttgtacaactccgtgaatgtactaaaacccactgaactgtacactttaaatgggtgaattgtatcacatgtgaattacatctcaatagagagggtttaaacaaatgatgctataccttgagtttacagagcaaaatgtccctacataactttgtgtttccatgtttgaccacttagcaggaaggcctctcaagttaatgaacacatttccggctctcgcaagacagtcttactgattgctatgagactaaaattccacatgaacagaaccatagtgtctggatgaccttgatgagcaagagaattataaatacaagttagaaaattttcaaaaaagaaggaaggaaaagaagttaaagtgggaatagggtgttaccactgtgctagaaaaaataaaaagagagaaacaaacaaacaaaaaaatgggtgaaaagttgtttttagtagaacctctttaaacaaggggaatgctttcaacagtcccaagcaaatttcagtgtcacatggttaaggccaaaatatcccaaaataagatgaataagataagattatggccctgttgctatgacttcattatgtggaatatagatattgggcctgtgtcactggcagacattatttatatatatatatatatatatatatatatatatatatataaaatatacaaatatatatgaaatatataaacatttatttatatgtttacgttagatttatatatgcatatataataaacataaatatataaacaaatgaacatatatttataggaagataactttattttggtataattgatacagcataaaatttatgcattttatgtgtacaattcaatgatattttagtaaatgtaccaaattgtgtaaccataactattaattcagttttgcaacatttttatcaaattatatagacagtcctggtggctgctcagatatgtttttgcttttgattttagaaagtcgagtttcttagaagtctggtgtctagttcagtgggatgtttatgtcttaactacaaatgggtgcttggtcagatcactgaatcctgaacaactagcaaaaaataaaaaggtgtttcccctcatttattagattttgaactttctaagaggtggcctagaaaggaaaaaatatatatataccattactaacgtatttcaagtttgattgtataatattgattttaatccttcatttgtaaataagtactttttgattctcttattaactcatactctaaaacaacttcattgagatgtaatttacattctataaacttcacctgtaaacttactgcgttggataaccatcaccacaatccaatttgagaacatttttgtcacttcaataacatccctggggctcactgacagtcactctcctttcccaaccacagccccaggaaaccactaatctattttctgttcctatggatttctggaaggcattacactttcacacacagatagaaaaagatatatcaaaaatatatctctcctttaagaaaatcctatctctaccccagaatttcagtgtttgtgatgtttaaaatttttaagtaataaataaaagttgccacaaatgctatgaaaaacagtcccccaaatgagaagtttctccaccataatatacattttaaagtttataataaccaattaatagacagcactttaacaccatgtgatattttcctgattaaagccaaaagctactaattctaccctgctccatgactaaccagcctcccaccaaaaacaaaaatccaaaacactttagaacacatattgttcattttatttgcagacaaaactcctggactactggtctccttcaaatttggatcataagctgaattaagcaagggaaacttcccaaaatgacatcctattctgcagctttttagagctacagaaacttttctagacattaaattctctttaaagataatccggaattatgttagactagtttaaaaaccatcacttttcatagcaacatgattatattgtgggcatttccaagttaattatagatctgtcattttaaggaataatcattaattgagatcttttcattgaattaatgaagggatattgtacagctgcaacaaaataacccttttccccttaaccatcaatggagagaattcgtaccatggtaatttggaagctaccaccatcatgtatgcatatatcatagttctcaagaaaatattgttcccgaattgtcttttcctactaaagaaataacccttggtcaatgtgacaaatatatgacattgagtcatttccacataactctccagcagaccacatctgtgaagctagataaatcctgtttcaatttggattgccataaaacacaacactcttttcaggccagtccatggacttctgatagcagccttcacaggccacaggttgccactttccaagtctaggatgctgtggctctcacaagggtgctgacccggtttctattttcaactggaatttcctcctctggggtcatttgatttccaccctcagagacattttcctggttctctgttctgtgccccgacctactcgttgcttcaaaaccaaaaagaattccaggttcatcctcctgcacagtccagtgagacaaagactcgtggacattatgctttcaatctggtggaagccatggttttttgaacctcagtgagaccctcttagaagacaccaaggtgacatttactcaggaagctgctgagctctaagacaagacctgcaggaaatgatagcgggaggccatggtgtagagctaaagctgttaagacgtcttcattcaaagggtcacaagaatgtggaagagtcagccaaaagaaacatcacaaagtgtaagacagggctacttcctttggcacaacactggctgcattggcaggacccagagatggctcacccccagctcttgtggctgagcgctcagcaagccacacggagtttaaagaacaggagactggtgtttttagagtcagctcctggaggccctttatgttcttgcctctgagggagttctggatacagtaacataaaaatctcagatacatccacaagaagaactagcattttaaacccatgagtaaatgacacttttctgagtttaagtctccctttcgcactggtaagaatggcaatgtttatgaaaattattctgcctagaataattgcaaaataaaccatgaaacatatactatttttaacttaaaatttttaaagcattttccagtgatgtagagattggacaaggcaaatagttttcagacactatacttgcagatgcatcttcttattcaagaggaagccttagagtaaaaattggagactaaccttttaaaaaaatgtttcccttagcgctatacacatacccagttctgcacatatactggtgaatcaatgaatgttcactgacattttgcccttatctgaaatatacccaccactcccctccataccaacaatatgtgtccctttcttttgccttcatactgatgtaacgtagacctatctacagtgtctgtggtaatttgagacatagcattagactagagataggcaaactttttctgtaaatggccaaagagtaaacattttaggctttgcaagccatgcagttcattgcaaccaaccactgaactctgctatcatagtgtgaaagcagccaaagacaatatgtcaataaatgcacatggctgtgttctaataaaactttatttatgaacactaaaatctgtatttcataaaatgttcacatggcataagatattcttcttttggtatttttttcaaccatctaaaaatgtaaaactgattcttagctcataggagacacaaaagcaggcagttgtctggatttggcctgtgggtcatagtttgttgacccctgatttaagaactgagctaccgtaatatggcagacagtctactagatatgatcacgtacagagcaaactggaaaaaaaaacaggccttggcaactgttcaatcaagttgatataatagaggaagatatggtgaaggtgttcaaacttcaatgagacaagattctgtgtgtgtactttaagtgcattgcttttaatgtagcttatccatttacatgtcaaaattgatcaaattaataatttaattgccaaacgttgcctctggtgtgtttggcctaaaggattaatatatttttctttcattcataaatcacctcatccttaatttcttctaggttttgaaacagtagctaaattcagaaatcttttaaaagtgatactagtaaaaagaagcagataaaaaatctccagggagatgttggtcaaggatacaaaattttagttaggcaggaggagtaagttcatattccttgttcaacatggtgactatagttaataacaatgtattatatacttcaaaactgctaagacaatagattttaagtgttctcaccacaaaaaataagtatgtgaagtaatgcatatgttgattatctcaatttagccattccacaatgcatacatatttcaaaacatattgtacatcataaatatatttaatttttaattgtcaattaaaaataaattttaaaaagtatccagggaggtgattctgaatggtttctttttgatagtttgaggaaccagagctgctacacacaaggaaacagggacgagtgtcgcaattctgtttaaatgttaatatcattcagtctatttctatattcccttaatgtctactcagtctttctccaatcactgtggatttatgggaactgatatcagtgagagaacctcaaaaccctgcttttgtcatttaattgggtcatgatgacatagatattgacatccatgacagaaagaactcactgacgaaacagaaaaagaaaatcaggatagatttgtaccttcttaaaagtattggcattctcaggataaactgattaaacactgaggtaaagtgaatcaattcccccatctcttcatccctcgttgcttcacatccttaccacagccccatcatggaaggagtgcatttccccacacactgaagttaggcttttacatgtgacttgctgtggccagtagcaggtgggtggagacaatagtgtgtcaaattcctgcctacgtctcaagagtcttcagttgatcccacttgccatcttgtgcctttgtcattgctgaacttctttgggtagatgctgccagcctgggccccaggatagatacacatgggacagaattgacagaagagccttgacactttggcctctggtcaaacagctgagctctgtctagctaagccaaccctaaccgacccacagatccactaggatccgtgatggtttttttatgccactgaatgtcagagtagcttgtcacacagcattagtgtggtgatagctaactgatacaaacacacttctacattttagacaacacagctataaggtaaagtacgattttgtgtgtctatgtgcatatatgtatgcatgctaggagttctatatttcattcctttctaatgacgccttaaataaaaatgtgccctcccccacctgcggcagcacagaaatatcatggaaggcctcattctcaaaccaagtttcctcttagactcactacatgagcctttgatcctttacagatgtttgcaatgggtgatacaaagtatctgcgtggtaatggtgacattacctgtctaattttaatgcaattaaattgcattaaaagcaagagttgggctcagtatgactacatttaaaaaatgttcttcctttctaataaatatcaagtcataatcatatggtaaaactgaaatatgtgaagtatctagtaagtttgcctatgtttgcagaatcagacagcatcagcagtttggacaccttttttaaaatagtgagcaccaaataaatgcaggaagtctttctaactgtgtcccgatgataaggtttcactcttcagcaatcctgaataaaaacagctattaaggattttttgaaccagttcatcatgataaggttcaaacctttccccaagagaggtctacgaacggccactccctttgaaatggatgaataaaaatgcatgtgtgccatgaatgccaaggtttacgtaactgttgtgctgcccagagcccagctcggtcatggctacctcaaatccatgcaggactcgtgtttatccttgttcgtaaatacttttggaaaaccctgacaagggcagagtgccagctctcatgtaccttttccaggctgctgcaagttcagtcacgcggttgtcggtccagaaatggatgtgccgttagaacagccatgcaaagagggagtgtgccgcatttacgcaggagataaactctgccgtgtttcaatcaaaagcagtttgctagtgaaaacacaggtgttggaattataaaattaccacaaccctcaaaccctcaactaaaaataacaaacaggatgttctttatatgggtgtgtacatatatatatatatatatatatatatatatatatatatatatatatacacatacatatatatgcattgctgacaacaaggacacaccaaaatcctctctgatctccctatcaattcaccatactttcttctgttatgtttatggatgctttgggtgtaaataatcaatggagacaggaatgtttccaccgtgcagcaagaacaggaggaagaatttaaaatgtgtcatcttatggagacagttcagtggtagcccagattcaggatgagggcaggagtagggtggatgtgaatacaaaggggtagcatggggggagtgcttttgcggtgatggaccagctgtgtattttgaatgcggtagtggatatgccagtctgtacaggtaataaaattgcacagaactgcacgcatatatacatacataaaagaatgcatgtaaaaacctggtaaaatgagaatctgtagtctagttaataggattgtcccaatgtcagcttcatggttttgatattgtgtaaataagatgctaccattgagagaagctagataaggggtacatgggacctctcagtactatttttgcaagttcttataagtcttcaattattacaaaatgaaaggctttaaaaagtattacctcaaaggtatcaccttaagccaatggcatgtcaacaatcacccactgcacagtgattcaagcatgcagacttggcaatcaaattaagagacaaggatttgagtcccagccccactacgtactagctgtgtggccctgaaacagacataaggtcagagctttggtttcctcatcttttaaatgaggataataggacctatctcacagggttattttaaggattaagtgagataatatatgtagaataagcaggactcatagagagcattcaataaatattggctattattattactctaagtcagactaaatatttctgagagctttaaatcactgattaatttcattgacactcaagtacatactaagcatcaggcacatgctataaatggccaagcattgagtcacacacaatatagtccctggttctggtctgcgtccttttggattttctggttctgttgtgaatatggtctccaaagaagcaggatgaatatttatgaaagtgggtgcacagaagactcaaggaggaactaacttaagaataagaggtactttctgcagtccaggttgaaatgagagttttctctctgctaaaatttactggggtacagggcggtttaactgcaatacttagctgcaaccattccttgaccagcagagataaatgaaaattgcctttcagtcaagcacaggttagaccatttgtgttgatgtgcaattttaagagttaaaaccctttacccatcaaccagaaaaaaagccaaaccaaatcttcctttttctttgtttggcaaggaaattacattagactatcctaatgggcttagagggaaaaaaaatctaattgtagtctatattaatacatttacatattttgaattatattaataaatactaataaatttagaccagggcactttaaagtaatgaactttccaatattagattaatgacaaaatatacgtagaatatatcactctctactaaatgctttaataggtttgtgatataaaaatccttaaaagcaagcacaccacgtatggatggagctggcatagcacctgagtactttaaatgtggtagtcaaaataatctacagtgtggaagaaagagacatttgaagcaatttgggagacttctatatacttaggaatttaaggtctttcataaatgtaagcaaaccccaaacaagactgaaaatgcttgtaatgatattttatgtttgtcaacaccgaccccccctcccgccagccctcaacaaaaataggaaataaaatgttctgcccttctctgtgctggtctcactggattggctgggcttgggcccagaaggagatggagaacagggagaccaagaagtcagagtatttactgttccagtctatccctgcttctctgtattttgcccttgctggagtcttctctggacacattgccagggtcccttccagccaaggctgcaagtcagtgggctctggtaacgctggtccctccctggtaacagcttctcagtgttgctaattgctgggtgcttcaccactcaccgttggttcctttaaacctgtcaacacattggcgtagttcattcctcaaattaagccttttgagtgatttatctgtttcctgtttggatcctgatcgacacaaagcccttgactgtgaatcagtagctaatgtgggaggatgccttaacttttgagataaaagttaagaccgtgttttgcattttgctcagaccatcgaaatggcatcttaacatgaatggaactgttgaaagtcatgtgcatagatacccacagaaataatactatgtgttatgttaccattttcaaatcattctagcaaactcaatgttccatacccttgctaatctattattcatctgtgggtctaattaacatggcatcaccaagctaggaacctagagcaatgtccagggatttgtgcccatgtggagaggcacccacctggcacagagatgcttggcaaatatggagcccacgtgctccacaaagtgctgagatgcttttagcctctgtattgcacttggactggcttatacatttctttaccagatatttcagtcaactgcagaaaggggtcattcaaaaatatgttaaaagtttattcatctaaactacttctgttgctgttgccatggcaacttttctctaaagccacaactccaaattcttctaaaattgttatttcagaaatctaatttagctgacatcccaaacactcaaattttactataagatttttttttatgttagaaaagttctaagaaaatgacaagtatccgaagagaagaggagaacaagcctgacaggttttcatttgaaagagtcatggcatctttcaaggaaattggaagtggaagagtcttcagtaacagtaactgtatttgaatgaaaaaatttggcttatattttgtatatgtttcttgtattgaaaagtatcccatattcacatccaagtagtcaccacaaagatagtgaaagcagtaccacataatgactggtgggagtccttgttgcatcactggatctacctttacgtttttaagtattcagggtatatttaagaataaaataaatcagaaaaattggtcttttgaaaataaggttagaatgagaaaacctgagaacagaaagtacattaaaagatattaaattaattaattgtgtttgtaaacagtggtctcagtccaaaatgtggcaagcacccaagaccgttaaatctatccccaccctccccatcatctcgtaactcacaatctaaaacagaccatgctaatggacatgcagtgacatggccaggagttaagaacgggctctgcaattcaatgggagaacaggtaggccacaaacccgcctgccaccctgggctgctcaggagattttgaaccctgatgtgattgagagagaaacgctgggagccactgtttccctccctctttcctttggcttttctttcagcaactcttcccttttccccagagcaggccggtctgtgtcattatcctcaaggagtagggacagaagcaggcactctagtttctcactttcatacagatgcagatcccacatccacacaccaaggctgctgagcactccacacatcctcatttggagattataacttctaattttaggcccacgattaacacatttgttaaacgggtattctggctaaatcagaagagaggtggcaaattaggcaaggctgttagacggtcataaaggaagaagttagctaatgtctgacatgagagagaagacagtaaacatttttttaacccaagattaggaagggctttggcattgaggagtgaagaaacaaaaagcccaagatgctgaggcttctggaaggaccaccaacaccctctccagagtaatccccacacagtatgaaacacactgttcataactgtgactcacagccagggaagctcactcacattttctcacctctatctctgaaaacccaagaaactacgaataatgtattttagaaagtgccatacaaaattgttctcaaaaacatttaagattttgatatctactgagatacaattaagtcagggtttctctgtctcagcactattgacatttgaggctggacaactccttgttgggttgtgttgtgctttgtaggatgttcagcaacatgtcaggtctctacttaatagatgcctgtggcaacccctgccagttatgataaccaaaagtgcctccagacattgcccagggtcctctggttcagaaccactggtcgattttacctagaatatggataccgagggacatattgccagatgacattatatagaggaagtattcctataccttttgtatcattagagagtttggctgaaatgaacactgggtggtaaaacaaaggactgctctgaaaacttgtactagattacctcagagtcagctgaggtgaagtattgtattgcactttctgaatctactttgctgctgaatcctacattttgtaggggctgcttgagtagtaagtggttcaccgtgtaaattaatcagtgtttgccaaacccagctgatattggaaccacccccaaagctttttcaaaggattgattccaagtctggtccttagagattctcgtttagtaagaattcagtgaaactggaaagctaatttttagtctcgtctctccctctgacctcaatcatcaactaataaagggttaagtttggaaagtcctagcgtaacctagggaaaaatacacaggcagccagattcatgttctcataaatatttattgtatgcctaccctgtgccaggacctgctctaaggcagtggaaagacagtgggaaaggatcattgggtccttgccctgaataaacttacacactagtcagaggagacagacaaacaatgaatatataatataataccaagtggtgatgtgaacaatgagggaagtggctagtgtgatatgatccagggtaactgagtgggctcagaaacacttcagagaaagcagtcaggaaaggcgacatttttcctgcaatttgaaggatgtaaaaaaaaaaagcctatcacacagaggacattccaggcagaagggacagcaagtacaaaggcttggggcagaaaagaactggtcgcatttgaggaacagaaagggcacagatgtggccaggcaatgataagcttgtggagtggggtgtggtatgaggcagagaagaccatgtaaggagcacttggaaggtcaaggtcatggatgaagctattattctaagtggaatggaaaccaaccaaagagcttaagcactgaaatgtcactatttcattaccttttaaaaagattgcactggccatagggacagccaaccactcactgagatgggaaagtctgagaatgaaacaggtgacagggaagtgaggaatcaagaacccaatgaagactttgtatgactggacaataatttcacaaccaagttgagagtcatgtgtgtgtggtccagggttatcacaatgtgggaacaggaaaagtaaataataaaagttcatcaccagaaaggactaggcaaagggtggtaattgttttcaaatgattggcagagatgtctgctatgcaacatccaacaggaatctgattttttatcaattagtagtggtacttaatgagtggtttgaaggaggggagatgtagcttcctaagatgatggggcttccacaccaaagaggcctcatccaggaaaatttctgcatgcagcagaaaagtaagcatgccaggttgggggtgggagtagaaaaggtatctacaattagtagaggtgtcaattaagaggattcaataatctctcacatatttgtaagttgaaaaaattttgcttttatgaggagacaaatgacaaccagagtaatataaaaatggttttataaaagtaagttctgggccatgccacaggtcagtataagttctgctgagtttcctaagatgtctacactgttagcaccgatggatgataactgattcatatcagcataggcctgcaacggcgcccagttctgggcatcttcagaattaccagagagtatcctgtattcaataccactcaattattaagcaaacttaatgacttcaaagtctttgaaaattgaatgttcatagagaacaaacgtggaaactttcatagtttccattctatgtgaaaacaggttctctgtcagggtaagcagcttggcacttctggtgagttccttaggaaggggttaactggagcaagggcagagtcagcatctgattacaaggctgtggtcaaaagcacagatggtgcagtgaccacaccaaacaggaagtgacatcagcagcagaggagctcagactagaccagtacaaggaaggagaatgagcagcttaggacctcaaaaactaggtctcaactactagattcatgaagtcattcaacacatttctactgagcacctactgtgcttccagcactctgctaggtgtccaggtgacagcagggacaagacacacatagtactactcccagcaagttttcaacctgccagcgagagagaaatgaatgatgtcagtccagggattcctgatggtgactgtataatggacactgatttgcttttctctgccccacttgagggtaaagacaggttggggcaccaggagagaagagcttgagcctcctaaggtccccagtaagtcacaaggccaagcttttaatccagattttttttagtgtctttcagaaagacataaagatattgcattgaacttaatggatacttaaatttttagtttttgtctacactagtcaaatttaaaagctatttggccatgcaatttgacaatacagatagtcacattaagtcactgaaggtccaacatttggttgttggtttattactgtggcaaagtggatcgcagagggatgattaggttcgactatcctcattgtctaaatgactcagaagagcactgcaggatcagggcacctggataaagctctcagttctgtcagcagcgacacatgtgctgccttgaattctactgttctgagcttagatttcttcaatcaggaaacagaaaacctgcataaggcagcaattggatttcagactgaaattgacctagactgtgttcaaatattttgcaatctgtataagacagtaacaaggagggaaatatcattatgactatttgcttattatataaacttcaagagcttctctagaaatgctgccagaaaatcattgattcattcatgtcatcctcatccttcatactctatcacctctttatcccatccaaactaagtctgacaggttctatgttctaagcatctctccaatatgccaactgctctcaacctcctacccagctgccaccctagcatcagtcatcttctcgaatctctcccaggcccaaataccaggatgcactctagctcctcctcatcctcactccatactgggatcatttcaaaatgtaaatctgattcagtcaccaaaaggcatcaaggacaacacccagctggaaggacggagtcaccataatctgaacgtgggaaaactgtaggaggaaattttttgaggagaacattagctgctaacacacattattttctgtgtgtgatgataaagcaagaagacagttgtattatactttgaaaatgtctgtttatgtaaatggaggatgttcttgtctagttaattgcattttgctctctgtgaccattatgaccatttaaaaagatgagtgagatgtccatagcaactcctaacattttcactatctaactgtctctttggaaaattgaccaaatacctggaacacaacaggcattcaacaaatgtttattgaatgaatcaaatgtgagccactgacctcttatatgcagtctcaccttggacaaacgaaaaagcactgaaggaagagcattacatacttatccccgaattatatttcagaggaggcaggaggtattaaggacacatggagggtcattcatgtcaaggaagacagacccaaaaaaaacccaagatcacaggaaaatgcacagtgggacaaaaccctgttgagcaaagtaagtggaatatttgtgctaaacggcaaaacaagctctggaattatcaaaacccaaatgagggaagtaaacaaaagtgcagcgttagaatagatattataccaccaagggttatactaatatgaaaaacaatgggtcgcacttaataaagaacattctctggacacgtgactgattcagagctgctgctttctcatcctaaagtatgcataggaaacttcagagagcccgggtgacttattccaacctggaatcccaacaaattccctctggaatcttcctttttatagtcttaaaccagaatatacatacatgataatctgtactagaataaagggctatttcatcagcagtcttcagagccccaagaggggacattagcatcggcttgactcttcagtttatgattttagaagaatcagacagcctaattaaatgacaattttaaaatatttttgtaatatatttacataattgaggcaataaccattcattgaatgaatagatttttttaaaattaaggagcccgttctcacctttcctcccccacccgcactcttgcaaatggcaaagacctcagatcatgaatcaaagggtaccagcacacagttcaaaaaggtggtggggtggagatgttgaatgggcacaatgagcacagactctacttccttcagtgtaaagcaacctctgttgaaaagtggttaccctttaaactactttaaaaggcaaatcactgagccaccggtgtctccaagacagatgaacgagcattagtaacttacaagtatctcatttggtgtttcaagacaagtaactatagaaaaaccagagaaagagctgttacaggttcctggaacgtttgcctgggaaggtatcttaacaatttcctaattcaggtcttcatttttccagtggaggaaagcgaagtgtacgaggtgtgcaatttgcccaatggccctgcaattaatccaggagccccgaggtgacaccaggaaccaactggagcagctccgggatgcctgagtccaccacccctgtccacctctactcctttcttcaaaaaaacaattttttttttttttatgttggggactggattttggaagacacgaattccagacagttaactgtctttgcctgattataaatattaatgattcttgtcaactctctgcctgcttctctccaatttttaaagttggcagtcagaacgtccagtctcaacagtgcaaatcaattcaaggaaaactcagtaaattagcagatgacagaacaactgcagtgtctcatctcaaaacgacacatctcacacgtggaaaatcaatgtctgaagactggaataaggtaaaccttctccctgcccccttcctggagggggcatttgaaatcttcagaagtagtagtcattcctcagaaacaactttccttttttccttctttcctttcttttctctctctcaaagaatatactcatctagtatctggatttggtcggtcgttaaccttaaaatcttgactccttcttcaaagaaggcaaatcccatgagctttctctctgttgtgtttcctgcagtacctgcagcacctagcgcagtccctggcacacagtaggtccccagtaaatctttgtatcaacagggagaacagaagccaccataagggagggggaaggtacgacagaagagcccctggtattctcttgtattagcgtgcaacattaatgataatgtgcaacattctgtcccgccacaaagtaggagggaaatgcactccctttctaaggagtgaaacggctgcaccccaacgctcccggcagcatttcttcagcaaatccactcgccgcacactgagatcatgaagcggccctgcctcctgtccagtcttattctcgtcctttcaacatatctgactgaaggctgaatgagcgacctaggcctaaccccaggaaccccatttgtcagcctttgtcagcgaggtggtggcggagtccagccccgtcccagatgcagtgaccacagcgttggggcaaagaaacactgaattcagggttggggctcccctgtaccttctaaaagatttcgggaagcgccactgagttagtgagcaggtggcacttcggggtgacgtacccggccacccgccaccccctcagccgtggacctgtggggagccccgactaccatcgcccctcgcagtccccacccggagcggcccagtggcgccccctgtgtcctctgcacgcgtcaggacactcaccgcgtagtgcagctggggcttctcgccgcggtacaccgggtgccccatgtcgcctccgggaggagtggcgcgccttgggctcagcctggggtcacggtgtctctctgagttccccgcacttcactgccatcctggggcagcccctgggcgcgagccctgctccgtgcgtgccgagtgctgtgcaaagcgcccctggcacagcgtcccgctgccgctgcggagccggtggggacctggagaaggcagcggcgcgaagggggagggggaagaggaggaggaggaggaggaggaggaggaggaggaggaggaggaggagggagcggccgagtctgatgcgatgggcgggcgtttaattccttccgctcctggcgggtccctccggcggccgccgccgctgacagctgttgggggctgcggaggccgaacgcgcccacgacaggtgtcaggctggccggcacgcctgcctcctgccaccccaccctccccggacccgtgggaccccggctgctgaggcggggactgccaaagcctttaatgccagcgagaaggcgaacttgggtttccaagaaagagagactttcactaactttgaaggaggtgtgggcctgacagtggaaggagattcagagccttctcctgggagggcagagtttccctttctagaaagccttcttctgtgagagtctcaaattgtggggacccttggggagggcaggactgagaggaaccaagtcatgctacccaggagaactgctgcggggacaaggctgcccaggatgctggtcacttagggtgacccgagttccaggggggcttgcagggcacattctgtaggttcacaataacccttaaaactggcctctgctctgaaatcccctcatggaaacctgcactttaaaacaccttggagaagatcagcgagttccctccacagccttgtccttctgtaatttacgtccagcctcccacaagttgagcccagaggaaggccaggcctggggccagagtagagactccagactcatgaatcaatcaatgcaagccccagaggggtggctacaaagtggaagatgtgcttgggggtagcttgtgccagtttgtcagggtcccactgtactgaaccggctgaatgactctccacttgctctgtgtaagaggagaggggaggagaggggaggaaagttggatgtggccccggaatttcagcccttacaatttagttgaatgaaccatccactggcatgtaatattttaaaacaatcacagcataattataattagcagtgggaatgtgaagccaggggtgcaagtggcctgaggaatctaccattagatagtcccatgacagtttatccacctggaaaactggatggttatatctgctaaagtcaatcataggcctaccttccaatccagcaaattccacccctagatatacagagtacaataatctcatcatataccagaatgctcatactgtgttgaggcataattgccccaaataaaagcgatccaaatgtacaccaactgatgcatgacaaaccaactgtagtctgtgcacatgatggaatactattcagcaataaaaaggaaaatgctactgatgcacagaacaaatggattaatctcacaaacattatgttgggagaaagaaatcagacacaagtgtacatactgtaagatttcacttatttattctgcaactgaaattcaaatgtttaagtgcaataggcaaatggaatccatggtaataggtgtcataacagtggttaccaaagtgggaaggtggtattgactaggaaggtggtacaagggaaccttctagggtgctggaaatgatctatatcttgatctgtatggcagctactagagtacacccatatgtaaacattcactgtgcagtacagttcagactagtgtaatttacacccttcactacatgtattttatactgcaaaaataaaaaataaaaataaaaataaatttaaaatcaatcccttgccaaacccaggaacttccaaacagtgttgcctgtcttatgagaaagtcaattgaactatttgcccaagtctttcattctcccacagcctgatctacccaagtctcctttcttctgctttgtaggagaaatgagcatgcccattgaccttggaggccttccttgctctgtgacatgtccaggcagagctcgaaaaatgacacactaaagttccctctttactctcactctgttctgctgctaaaagcaacctttagagcaaagtcatcaaagatcctcagaataagacagagaaccagcttgagcttcaccatctggcatctttcagagaattgcagccagggcagcctgatgggggcacgtgtgtacagatgtaattcaatggcctagacaagccccagtttagggactttcacttcactgtggtctattcataaaggtgaacactccagccttaggactttttcttccatcacgcttgcctttaagcccctgaagctaaaaatccctttccctacaaatactatttaattatgaatatatttaaacaacacaaggtggatccctgggtcttaaaaccttaaccatagccttttgatcattacccctgagtaagtcacctcttaaaactgggtcatcctggatttggtttgtattctttctttcaaaaatgtagtaagtcactaaatgacattcttgtaagccaaaaatactccatcagccccacactgtgtacttacattttaggaatgacttctgccttctagcattatttattgctaaagtgtcatagctaagttggagtaaaatgttcaagtgcaataggattgttttttctctgtgtttgaagagtttgtgagattgggcaaagcacctaaagaaatgatcagttcatgctgcaagactcttaaatcaccttggaatgaatcatccacctccttcaattcttagtccaattgtgtaaggctcaaagctccagaaaggatctagaagatcatgcagaactctaagaagtctgttcaatcttaaacaatttgaatttcacacattattcattatttcatttaaatatatttcagggtatatttaaaacaccactctaatcaaaatttcttatttgcatatctctacttccaagtatccttcccatgttatttgttcacttggtcattattcaacaaatattattttaaattttaaattttaatttgtataaatgtatggggtaacagtgtaatttcattacatggatagattgtgtggtgatgaagtcagggcttttagggtatccatcaccagaagaatgtacattgtgcccattaagtaattcaccatcatccaccccactgcccttctgagtgtccattgtctatcattccacactttataaatatttttaagtgcatactatgcacaggtattgttctaggtcaactaaactgtatattgacatggcatgtggttttaaaatgcacatttgatcctttggggtaatggagagagataaaaaggcagcaagaagcacataaaacctcacttcagaggaggctgaagttcatccaatttgttggttaagagcctgctaggctaatgttcttttttgtttgtttttcttttttaaaaaataataaatttatctgatgtttatcattcaccccagagaggacttaaaaataatctgtatgagttactctactagcatcacctttaagagaaaacgtgccctgctaactgtggaatttccatgtcttcctgtccctaaacattacagcatttccagaactgaatgctgccctttctgccagagcatttaaattaaaatacttgtttgcatttattctgcctgcctataggctgagttaaaattttccacagttaatgccaatgcaagggtgattacttttttcagaaaaactttacccaaatctgtggaagcaaattcaacttcagagtgtaggaagagctgagggcccatctgagtactaaaaatcacttcagatggcaggacaggcccttcttgaaggcccagccccaccattgttaacagagttactatgagaccctctaagatggggaatcccctcccccaaacccagtgcccacactatgccatcctattgtcctgttaatctagcccctggagtatttttaacattttgaaatggaaaaatcaatagcatataatgtgcagcttaatgaattgttacaaaacattcacctgtctaaccttcactgaggtcaaaaattaaaatattgctagtaccctagacccccatgtcccttggctgtatttccctcctccatcccagtggtagacactgtcatgacttcacttcttcacttcccttttacagcagggtttctcaaccccagcactcttgacatttgggaaccaatcattctttatggtagaggctggacattgcagaatgttttgcatcatccccagcctctacccactacatgccagtattattccccctacgccaattgtggcaaccaaagatgactctagatattgcagatgtcccccagggagtggggaaaggcataatcacccctggttgaaatccactgccttttaggaagtcaggcatccataaatattagagcttagtgttgcctgtttcctaactttatgtaaacagattcataagtatgtttttattatagctgacttcttttgctcaacattccgtttctgaggttcatccatgtttgctgtatgtagctgttgtttgttcattccaattgctgtctagtactccattatatgtgtttattactatttatctttgtaactgttgatggacatttatgtccttttcaatcttggaccactgaaaaccacactgcttgaacatcattatacatatctccttgtgcatatgtgcatgcatttttatagggtccaaacccaggaatataattgctgggtcataggcatgcatatcttcaactttactagacaatgcctaacagttttccaaactgtattaattagaatctttatttacactattgtataaacagactgaacacagtttatatgaagactgaacacagtttagagttgtctcttttttaagtctttttcatggggctacaaagatgaaattaaggaaatcaaactccaggatcagaaaggagagctggagtagcagcttaaggccctccttggctgaaatcatgtgtctcctgtaagtgaaggacctaccagccctgctaaggccctggcattggcagtgataaggccgacttcacccacacgcacagacaggagcaatggatacactgaatgtgcttttgagggaggacatctcattaggcagaatttcagcaaagtgggggtaaaatctcagcctgataactgtaaacatatatgccatttcaggaattatcattttactctatagccataatttcttcccaccctcttaacccttccagggatatggagatagaagaaatctaaggaagaatgaaggttctcattcctttttccaggtaagtttaaggagacaacccccagcctgaagacagctgggctgaagaccagtgaaggaggaattcctgcagctggagctgcagtcacataggagagatggagaagagagaggagaacatcctggcacagcatagtaccattgtctttggcctcaaaccctagtacaaagaatatcataaagttatgcatcaattggagtcgagaatatgataatccgagaattcagggaaagaaaacaagtgaggaagggtgaggaaataaatgaccattacagtaggttctatttggtattattggtttatcttgttttttgccgttttgatattttcactgaagaatttctactccatgccacagagccagggagggtatccttaaaaagtgcctaaaaagagacatttctaatatatatgttctattcaagggtcattaggcaaaaaggagaggccgcaatttctccagctacgactttccaaataaccatttgggaattaagaaatgatttttcatttatatccataatctaatgttagtctattgccttcattcctctgatcataatctcctttcttctgcacagttgcacagtgtttcagttgtctaaagcctgcagaattcccatgacaacgccaacaccgcaggtgctagaattattgtttgaaatggtaacaattccactattcattaagcacctacatcacaggctcaactagatgctttgcaaacatctggatcctcagaacaactgggaaggaaagtatgactatcttaattttatttatgaggttaattaacctgttttgcatacctaataaatggtggagttgagatgtaaatggtagttgaccccaatctctttgcaggtcattccagtatgtttcaaggtggagattctttttgacaaatcaggcccattcattagattgctggtgtcccatccacacctcctaggccagtgattctcaacaggggaaattttgccactgaggagaaacttggcaatatctgaagctatctttggctgccacaactgcaggggaagggtgtcacttgcatccagtgggtggagaccagagatgctgctaaacatcctgcactgcacaggacggccttcacaacaaagaaagttctggtcccaaatgtctagagtgccaaggcggagaaatctttcacagacataaggaattcatcctttaataatttccacttagcagtacctctcacaccaacaacacattttctttcagtgaagtaggtcttgcaccacccaagaaaacaaagagaaagttctccagagcagaagagtagagctgagccctgggtctccacccatcgttgaagacccatacacaagtgggtctccacgcaacactgtgtgttgttaaaaggctaacagactgggtaaaaattggccatctgtgtgatcaaaactgaccactctggagttctttggagtgcttgactagtcacccccctaaaaaaaccacttttataacctcaagaaacccctggcttcagaggctcaggagtaggatgaatgatgacacctggcattactctggtgcctgcaggtttcaaagcaattttgcatatattggtttccctcccctccccccgccaactaatctatcttgtgataatgatagggagcagaacatataaggcaaatgttaagaattcgttgtcaggagtgtaataaaatgaggagaataaaacagaatgtccttctcctgccaagtcacttaaactgtctgtatcccattaatccagcaaatagagaggatgagccagggagttccagatcccccaggaatgcttggtacataaaggtcaagaaccaacagtttagcagggccttctttgccttgctgtgcagtaagaaccaaccgaagaaaactgctccaagcctaatttcttgattattttctttggggaccatgccttatgaaggtggttctcagccaggggcagatttgccccttagggtgcatttgacaatatctggaggcatatctggttgctgtaacttggagggagggggagatgctactggtatctactaggtagaggccagatatgctgctcaacttcctacaatgcacaggacagcctcccacacacaaggcaaagaatgatctggtcccaaatgtcaatagtaccaaggttaagaaaccctactttatggttaaaattgttatggtcaaaataattctaataaatcagaatctaagcatcagactgggacttttttcattatttcaactttagttgtcttccttcatgtccttgcacacagcacagatgaaaagatattacctggaaagataataagatttcttctccctttcagtggaatacagaacaagaggaagagggaccagaaggaaatggctagtcagtgtttttgaaggtatggtcttcaggaccatgggcatcagcatcacttgggtgggtttttaaaaatagattttgaggacctccccagagcctacttgcacaattccttgcagcaccacaccattgacatttttagtgagattctttggttgttatcccgtgcaacacagtttgaaagccactgatgtagtggtagtatgatgcagaaactgaaactcataaaggccgggtgatttgtccaacgtcatgcagatagcatgagacaaagtcagaagccatcctgagctctggatttaatgttaaaagaaggtggaaaatagtcctaagtgtatgactaacaagcaaggattagatccattcatagctacagaagaagaaatgaccataacatttggcccagttcagcacaacccagagcctgctaagtaacttgctacattttcctgtggttttgtcaagttttctccccattgtcttcatgactaagaataaaaagaatgctacacgtgatttcttttaaagctcttaagataattgatttccatccaattttatttttcagaagcacaaaattttttctcacattaacatgtcaagaaatgacaaatgtatacataaactacacaaatcattagtcctcttgattttccaaagggaaaacccatgcagagtctatcgaaaagccttcttacccagaaaataatttgttttctcttatcttagcaaaataaacttagccacttgttccctgttgttgatgggaaagtctgagatttggaacaaaagaaagctgttttgtacattataacagataatatgacaacctcaaagctatcagtttgcatttctgtaagtcccatttttgcagtggaatgattgaaagaacagaagatattcagtctttgaaagttgaaggaggacataaagatgatgaataatttgaggggatgtcatacataagaaagtcttgtccatatttcttcagaaagctggataagtaccaagtgtggaagttaaggagactcagattttgtctgaatataagaaagaactttctgtatctgacttagcaattctactcctaggtatatagccaagagaaatgaaaacatatgtccacaaaaacttgtatacatatgtttatggtagaattattcataatggccaaaaggtacaaacaaaccaaatttccatcaactgatgaatgaataaacaaaatatgatctatccatacaatgaaagattacttggccattaaaaggaatgaaatactgataaaacgtagatgaacctcgaaaattgtaagctaattgaaagaagtcagtcacaaaagaccacatattatattatttcatttatacaaaatgtcaagaataagcaaatccacagagtagatgtcgggttgcctaggactgcagagcttgggggttgaggagttgagggggggatagctaaagggtacagtgtttctttacagggtgatgaaaatgttctgaaatttatgttaatagtggttacccaactttgaatatgttaaagaccaaggaattgttcactttaaatgaatgacttgtatggcatgtgaattttacctccataaagtagaaggaaggaaataaggaaggaagaaagggagggagggagaaagggaaagaggaaggaaggactgactttataacaaatctagatggaaggcaacagtcccaggaggtggtagtatcttcttccctggccatatgtaagctgaacctagattaccatcagccagagaggctgcactatgtgggcagtctcactatacgcccttcaaactctaaaatgtaacagtcactgtttcaatattttatcctttttctgtttccctaactgcaacatgagtagtgcaaagctggcttctatcaattcattcagtccattctttcattcaatatttcattgctgacttaaggtaaagccttacgatatttctctgtcttaataatatatgtgcttgttgctttaggtagagttcctcagaagcagatactaagataaagactgatgtgcaattgatttattaagaacctgttcccaggagaaactggtaaggggtgagcataacagggtagggaagggaataaagccaagtaagggtgtgatttctagcaaagtcccagtctcagtctggtcctgagggaagctctggggtattaattacatctaaactttgtcccgccttcgccaaagaatttggactttaatattttcacacacatcagtcagtcatgggctgtgggacgccccgcccccagggtgatgtaaactcccaggcacttcctgctctttgtgaatatagggcaactgctccagaaccccacagagtgctcacagatgttggtcattagaagcaaaactacacagaagctggtgaatgggacaggcacacagaactggtaaaagatctgagatattccgggcagagcacagacagagtccactgtgctttttggttgaatacatgttaagctctaaaggctatgtatgaccttgttcctacgtccagaggtcttgaacagggtagaagcttgcaacctccagatttccacctgggtgaggtatgagtcggtcttttcgtactcctccttactgataaatgctttgactgacatctttgcctacattcgatctgtttcatttcatacaccgaaaatcttctgaaatgggtaatctgcccacaagcaccacagggaattcctcaacagctttagcatccgtaatattactccaaaatagcattgctgttctgcctcttactttaaggttgggcagatgccaaaagctgcaaacccatggaaccatccatgaccgggtacacttaccagatttgtttccttctcttaaattaacacaaataggcctacgatgctaattccggagccacgttcaaatttcactgtttcatcaatcatttcgtgagctcattagttgattaacacttttttggtggtgattaaattagtgtacatgcacactcatgtgatcgtgtaatcacttaaaacacagccaggcacatagaagctctgtatcaatgtttgctattattacacaagtacagagcttctctcaggttgtatgatgggatctttgtcctcaaaatcattcttcctgccaaagggcttacaacagtttttctgacctatttcaattaaaaagaaattgtttctatcttgcctttacttctactacttcttactagcactttcttctttcaagtcctctgaggttatcacataagatggggttcctggcaaaattcctcaacacctagcagaaagacagcaaatattccatagactgaaaaatgagaaattctttttaaaaagggcagaaaataaaagaggtcccagaacctcttgacgcatattttggtggtgaagagagagccagagggctttgctccagagtatggttttgtttgtatctctgaaagtgcacgagttgaaattccataaatagaggagcttctgtaccactttctattgctaatattttcttttcctctgacgtctgtcctcagcatttcagttcatggtgagtgcttaataaatgcatgatgacaacagatgttagaaagtgttacgagagcacagagcattctagaaaaacctaggaaaacaccagtgggggaaaacatcattatttaataaatttatgaaaactttaaaaggaaagcatgttgcttttcaaccaaggactttctaacagaacaaacctgtggggagataattgtctcagatctagcacagggtgagtaaaattgtttttacatttttaagtggttggaaaaaattaaaggaataacattttatgaaatgaaaattacatgaaatacaaatttcaacatccataaataaagtcttcttggaacatagtcacacccattcgtttacttacttgtctatgactgctttctcactacaccagcagaggtgagcagttgccagagaccaactgcatgttcactaaacctaaaatatctggccttttgcagaaaatgttcacccacccctgatttagaaaactaaaattgcaatttgtttcctttgaatctttttctacttttggctttcatcttttccctcctggagttttataagcccaaaagaaaaaaaaattatcttccatatattcatctctattaacatagtgattattttgtttcatttatagtctggaaacaggcaacttaccaaagagaaaccagactgcttagatcaagaggacttccaaattggatgctactgctttatgtatctgagcttttaaagacacatttgtattatttctagaagccttaggtaaatgtatttgggattcattttgtctgtagaaagcacctgcagccccatttcttctagaacaatataaattgtaactaaaaacaatgttcccttgttgcatttgtatttactattctcaaaccatttgacaaagtatttccctctcactaattagtgtttcctaagtgttattggaagccactcgcttgccttgcaagtttaatcctacatttggacacatgcttgttaattggtttccctccaaagttgaatggggcttgcacccatctgtcctggattcaattacaccaaatgccacatgctctgagatcagaaaagcaaaggattctaaaacatccatgtctatatttggcccttgacatcctattattcttccttgtcttaaaaaccctaggccactcacaggaagtgaactcgaattgttatttttatggcataaacttttcaacaggctgtaacttctatgtcacgtcatactatatagataaatatgtgtgtacataaaatttttaaaaatccaacccattgttttgcacttactacagtacacatagcatcctctccacactttgaacattccaaaatgcagccatccttctactcaatttcttgccagaggagatgcccactgaaattctaggtcacacattgaatgtgattcctttgttttcaaggagaaatttccctccacctataatgctctacttcctctgtcacctcccttccatttctcctttgcctgtgtaactcccattagcctctctggattttctggagggacattccccgattcacctcaccaccctccaataggagctttgctagcttcctgttcgtacctctgttaggatgctcatcttgtctgtttcctcctgaaacacttgtctcctcaaagacagggctgccatactcattttttaaccccagagcctggtcccatatacaataaccacttgagtaatatttgttgaatgctgttactaaatacaatttcaggagatgagaacaatcagcatcagtggttacagcaccagcaaatcaagaaacagtctcatcaggaatcaattacaatggcaatgactgctgcctggaggaacctggtgatttatataacataatcattcatcgggcccagatttgattgccatgcccaagtgctgaatgctgcagatggctcaccattctcattaggacactgtgatgtagtatttcaaaagcaaaacttttcagaatcataattccgacccttaggaaagaacaaaccatatctccagaaaaggacagtccacaggaaatcaaagggatgctctccaatctcagggctgccatttttggttacagaataaatatatcaaaggccctcctacgaaggaattcagtatgaccaagaggtaaatgcgactcccagagcaggggtgcttcccaagaacacattagtctatgtagagtttaggaggcagaactctctaatttggtttctcaccaaaacaagtgcaatctactcaaaaccctttaaaaaggctgtgctttgataattgggtcttgtctttgcatactctcccctgatcaactctgttatcagtgagatctatctccttgatgtttccacactgaagggacatcacggggcagaataatttgcttttcctaagacaagactctccaaacgttttggttcacaaagtgagaagcccaactagcagccaaccacaggagcctggcaaggacacacttgttccaatgcccctagtcccccaactcaactgtcctcctgggactgccaagtaaaaaagagaaggaacagggaagttatttccctaaggagccccttgggaagcagcggtaacccaagcacaggggccatgccactttgctttctactgtcagattttaattttcacaaaatcgagagtcatgagattttctgtgttttctcctaaactaatatttggatttctttttaaaaaatgatccttttaggtgctacacgagacctgggaggctgcattgagatcacctaaatcttctaagattcttgtacacagctccaattccttctcatcacttgccaggttttttttttttcctttggaggatggtaacttaaaaaaaaatctcatgaatttctacacatatgtatttgaaatatatatacacacatatacgtaacatatacacatatacagtctaagaaacataaaatgatatttttaaatgaaagattctggataattatgaaacaataactagtacatcttatgtatataactattggattgaatatctagctttacagttatttaaatttcatttacagcagtgtctttaaaaaattgtcatcaattgccctaattcttggattattacatcccttctattcatttttagcatttaatatttttctttcctttataactccccaccggcatcaatgagaggggacaaatttaactgaatatgtcagccaaaaaatatgggtgatttttaaaaaagacctggctgtttcttctgaccctcttcttaaaaaaaaaaaaaactgcctcaattcttcctttgggagtaataatatttgactccttttgtaaaatctaaaattgattttttttagaagtatacacattttattcagcttcccacataagactgggcagccagtcaaaattcaggagcacaactgaggcagacaacactttgcatacaaacagctcccccagtctccagcacttctttacaatttcacgaagttaagactaaacagaaacgggggaaaaaatccttccaaattgccttcttagggtccataaattccacattcagcttctttgcatcctttgctctctcctttggcaagaaagcccaggagcacgcagtctgctcagtgggttaatccactgcagtttagacacaacctttttatttttgccatggggtgtgtggagctgagaccacctagtcagtcacactgtcagggtagacgtagtcaaatgcaaaaatctgaaaacagaaaatttattccatttgtgaataagactagaatccaaagggccagggctaattatgtggttgtttcatgagggacatgtcataggcatcattttcaatagaaaactggctgagagcaatgctgatacatttctatcattaaagagatgtgcattcttttttctgtttttgaaactctttattgaaatacaatatataagcagaaaaattctgaactcataagtgtacaactctgcattttgccaaagtgaaccccctgtataacgaccacccaaatcatgaagagtcctctcctgatctctacccctaaaaggaaccatattctgacttcaaacaccattgatctgtttgcctgtttctgaactttaaggccacagaatcagtcttttttgtctggtttctcttgtcaatattatatgttgtagcaggtagcgagactcctcttcatcgctaaaagtattccatcatatgaataaaacacagttttcccttttctattgttgatagacattttggttgttaccaactttggattattaataaatagtgccaacgtgaacattctggtccatcccttttggtgaatatacgtaggcatttctgttgggcgtatacctgagagtggaatggctccatcacagagggggacatatgttctactttagtagacactgcccaacagcttctcaaagtctttataccaacccacagtgccaccagcaatgtacaagagttccagttgtcccatattaatgcaatgcttgatattgtcagctctctctttatttcttgattatagccattctgatgggaaagcagtgccatcccactgtggtttaaattaacatttcctaccaggtgcggtggctcacgcctgtaatcccagtactttgggaggccgaagtgggtggatcacgaggtcaggagatcgagaccatcctggctaacatggtgaaacctcatctctactaaaaatacaaaaaattagccggtcatggtggcaggcacctgcagtctcagctactcgggaggctgaggcaggagaatggcatgaacctgggaggcagaacttgcagtgagctgagattgtgccaccgcactccagcctgggtgacagagcgagactccgtctcaaacaaaacaaaacaaaaaagaaaaccaaaaaaaaaaaaatatttcctggtgactaatgagttggaacacctgttcatgtgcttattggtctttggatatcctctttgtaaagtgtctgttcatgtcttctgcccatttttttcattgagttatctgtttagaacagaggttggcaacatttccctataaagggccagagagaccacattttagacttcggaggtcatatatacagtctgtgtcacaactattctgtttgacagcacaaaagcagccacagaccatatgtaaatgaaggggtgtggttgtgtcccaataaaactttatttaccaaaacagtcagcgggctgaatttagtccacaggcagcgaatgttgaccactggtttagaagatttgtgtggttttgacttttaaacattagcaaaagttgggctatataccagagcttgctaattgtctacccaatatccattctcctgtcattcattggtaagataatactgaaggaggtggtaaaaatacctggctgaaaaaactatcgatattggagagcaagtgttaggttgagggcttcagtaattttgggaagctgtctcagcaaggatgcccttttgagctcccctcttccttattctttctgtctgatacatgggcatgatggctggaaatatagcattcatcttgtgagcatgagacaaccttttgaatggtgtggtcccacatgattatcttaccttcattactagccaaacatcttgtcttcacatttccaggtgagagaccgattctgattacagggtcaagggcatattactacctggagacttttgcatacttattttagcaaaggtacacaccagagaaccacacaatgcaaatgtccactcgaggctttaacaagcactcttgtctacatgtgacaggatttaataagggggaacaatcttttttcccctatctttaacaccaaaggaatgactgctttcaaaccacttcgggcttcttcaactctcttgtttcatagcccagcctgttctaaaatcattctcttctgtctgaagcattgcaaagcacttttccaagcaggaagcctgagcccagcaatactgtgattgtaaaagcaaatatgaaagccattataaactcagcagtaactccctacttagaactttagaatttatttttattgagaagaacattcttttaaaagcactgttcttttccttgttgtctgagctcactttgcctacttggacaaaaactgaagctgttaagagttaaggctgaagacttgaatatgtggtccatatgggcatgaaatagttgaattcccaggctcttaaaataggacaggaaggcatcaaaaacctctgcaaggtaaaagttttctgacattgtaagaactcttaaaactcttccccattttccaagaccacatgggggccagataattttcactcttactgtgtcacttttcaaggtggtgctacttaataattacatccagatgacagacaaaaactggattatcctaggcaaacctagatgtgtggacatcctacacacattgccccttccctccaagactcaatgcaaagttgagatcaaatatgtcaagagaagcctagggcagcagcatgcagatgtagccaatgctttttagaatatcagttcaatgatatcaaatctggaactttgcaacatcttattagggcagtggtttcaaccagggtgattctgcctcccagaggacattgggcaatgtgtggggacattttggttgtcgtgacgagggtcaggggttgggcactactggcatctagtgggtagatgccaaggatgctgttaaacatcctacagtgcacaggatggcctgtcacatgtggcccaaatatcaacagtgctgaggttgagaaactctgaattaaagccagcagaagctagagaaatagataggatgggccatgcacattccaaagcacatcagcatgaaccttatgccctgtggttggttcagaagaaagacccagtctcacaggttgagtaaagttaacttcccatcacaccacagtcagagttccccagttgcttcaagcagagggtacagaagttagtgtcagactgttgttattatatatgttcaaattacatttctcaataaactaacttattgaaaagtaatttattacatctgagaggttaattattgttaatgatttgtttgggcttttgttctacaacctgaattaaaggatcccttcaggtattattccttgaaatcacctcaactgaccactgtgatgagaatttccatgtccagagtgagaaaggcagatcatgacttctggtatctttttttaagaatggagcctgaataagttccatcttatctgggcatgttccaagtgaaaaattcagtaattgggctttagaaagaaaagaaattgataaccagccatgatactcagtattcattttccaatatggaccaacatggatgtaaggaactgtgttttttctccttaattgcttttcactccttcttttgatgccctcctcagataaattctccatgtgactcacactgaaaagaaaaaaaaatgagaaattctcttgtagccagaagagttgttggcagaaagctgacattccgttccttttctgtcctaccaacgtgcacacatttaattccaaagaatgactgatgaaaaaaaattaaaaaaacctctgggccctgactgaaacatcaaaccacctcagagggtggcaaccttaataataaatatttaataggccttagttgcaaatatgtaaatactttacagagacaatgaaaccacataacttcgattgacattttgaggaatatctattttatttgtagggaagtatatctcacttcagcctatcttctaaatcataagaacgacattgagtctcacatcttgtcagagattttttttggccaggccatattttactattaaaaaaagtgcttattaatgaggagtctctaaatgctaggaacagatttgcaatctaatgttagttttcccagaagacactgaatttccataaggaaatagtttagaataccgtcattggtctagtcaacattgaattacaccatttcacttgtgcctatggattacatggttgaaggaaatgacactgtagcgtcagacacgcactttctccaagatgagggaggaggtacttgagtcttcaagggagtaagttaagatgacaagcctgatgactgtctacatcagaatatcgtgacctattagttttccacaaacccatctgtagttagaaccttccatgtgtcatcatttacaagttacttcatttctatagcaccataacaaactatgatttaaatggttttattgaagccaaaactgaaaagtcaaatcaattaaaatatgaacttggaaaccttcccacaaaaataatccactagagtcctttattatcttagatcaggggtcaacaaactacagctctcagaccaaatccagcccactgcctatttttgtaaataaagttttattggaacacagccacaactcattcatgtattgtatgtttgctttaaggttacaaaagcagagttgagtagttgtggcagagattgtctagtctgcaaagctgaaaatatttactctcggctttttacaggaacagtttgctggcccctgccttagattcctgggtctcttccaagtgaatacttttacacaggggtacttgtatacataattaataatcttcaagaaagaatgttatctacagacttagcaataaaacatgcaaacagtcacaaagcaagaacacatggttctagcaagaaaggtgtttctaagggatgctggctccacaaatttttcacttaaggcattgcaattttcataaataattgtcaattaatataaagaatttggttgacatgtatatttattgatgcaagggtgggtgttttaaaataacagatataataataacccgttctatagaagacagctgtgttaaaacacttgcagtcaccattggacagcctttatgttaaggaagttgggaataaccaaggcagacttctagaacaaaggagtacaagaagactaaacaaatacttctccacacttatgctttccacctcaattggaacagctttcgcctcaaagcatattcagccactctctgtcatgcatccactataattgtaccacttggaaatcttaacctcaaatattccagtctttgagcacagcctccaatccttcctccttacttgattttcttctggatcatcagtccctcttgacttttgtgccttccttatccagcctggattccaaagtcagctgcagaaacccttcttgcccttccgttgtctcagaccataccaccataccctccttcctcaagttggatggtaagtacactggggcaaaatgagtgcacaaatatgcagactagacacagatccacaattcttatcccagatggggttcagagcactggttggccatcagtccattgcattccttcctcttccaggacttgcagcttttagcctgtactcactccacttcttttctcaagcccctgcatgaactggcaccacttaaagttacctcttctctcacagagaaccagcacgatttctgggaactattcctccatcccttaaaatatgctgctgtatagttgtgatataattggtctgggggtgggcctggacattgggattctgaaaggccccatagatgatgcactcagggctgggaaccactggcctagtctttaattcctcccaaatgagtgcgttcatcttagctctttctctgagctcctaccaaaaagctccctggacacccctgcatgtacattccacaggcatctcaaatttatcatgtgaaataccaaacattatccacacttctctcctaccataaagtatgtttcattgaaatgtctcaccttcatccaattttctaagccaggggccagtgatgcctccagggttttatatgcagcaatacagtttggtgcgggaggctgggagtaagttttgttgacttggtttctatacttctctggggcagctgggaacaagatgttgtgaaagctatgagaagcgtattcttcactagccttcctttgtcactgccagctgagacaccacctttggcccctaacccaacaagccaccaaggctagtgggccccatgtcagaattctctcttgaatctatacgttttatttcctttgtgtcctcaccaccaatggtttattcattggtctccctggctttggcctgccatccccaccttcgcaagccccaatccatatagcttactctccactgccaaaactgtctttctcaagtgccagttcaattacatctgattagcaacagaaatctgacatccaggcagccattgtgtgttgtttgggagtccctggaagacctcacattggtttgtgctcccaggaatgcatcccagcttttctctcccgcctgggcacattctcactaggcttctaggctcgagctctaaagtcacacctccactagtggagcctcctctacacccacaggccaatgcacccctacctctttgggctacgctgcccctgtacatgccttctcttggattaaaagtcatcatttattttctacatgtgccttctttcccttaccaagttcccctgaaagcatgagccacaacttcctgatttttagatctgcatccttcagcacaggggctggcacactgctggagatgtgctaacaaagccttagtagatggatgcatcaaggtccagggatttggaaggattcctggatgatttgtagctgactggcatcagtgatcataggcgccttaggcaaaactgggagtaaacatacgtggactgacatgtcagaaacatcttggctaggaagaaaaatgtcaggctgtgaagctccacaatgctgctggggaacactctaagacacacaggtatgatatcctttccctgtgacaggtgagatattcaccctgacagaaatggctgatgagtgggcacattccacgaccatggacactcacagttgtcaccagaacagcccctagataccaacaacaaggcagtttgttcttgctcctttaagggagagcttcccagaaaaataagaagtaagctgacaggtcgttgatatttgcatagagcgtgataagtgatttatgcttgaaatcccctttgtagaacaaataataagtgtgtgtgtgtgtgtgtgtgtgtgtgtgtgtgtgtgtgttcttttgctatctattgtatgtttgatcccaggttgatgaaagggtgatagctgaaatcctataaaaaaacagcttgttgggcttgcagccccgtcaacatatggtgttcaaactaaatacaacaaacgtgtcatttcaacgtgctcagctacctacgtgaaattctaaacaagtaatacaatatgaggagaagagaaatgtttttctggaactgagcacctgagcctgctgggcttctgagtcatgctagtgtgagatgagcccttcactgcagggctctggtgagcctgccctttgtaatgcacgttcttccaaggctgaacatctccgacatcctctaagaagtcacagaaaactcaccccgaagaaatccgttttacagcatcagattcatacactggttctgctagtacttcctgaatgccagccattccaaaagatgaaaatcatggtccaaagcagggtttctaatcttcagcactatgaaccggtgtgggcagataactccatgtggtgctagctgtcttgtgcattgaagaacatttagcagtaccctgggcctctgtccactaaatgtcatttgcacacctccctccattgttgtgacaatcaaaatgtctccaggcattatcaaatgtcccctgggtggcaaaatcctcccccatttccccaccgctgacctccgttgcaaaccactggtccaaaggatggcatcttgctggagaattaccaagagggctgttaatatgagtgcaggtgagagaccccagcattcccattcgtggatctggctgtgcagcatagcttgcccagggatgcttagcctccctgtaacctgcacacattggaagtgttcataaagccaatgtcacatggatcctcagggaagagttatcacaatagctgccccttacaagaattcattccaatacccttaacagttgcaggaataaaatgcagctgttagacgcaggggcaaacaccaagatgtggcttttctttctctctcctttatttttcataattacccaaagagaaactgttatcaccatggcctataatggaactaaaacgcaggagaaccacttgttaccatagcaacaaagccggagtatattttctgtaccccttgagttcacagtgcagctttctggtgccatctgacttgatttgctaattgctttcacagaacaatcagtccactcaagcattacagttcaagaagtaaaaccttagttacaactgatgataaatattcaaacgtggttcctcaagttgaaagagggtttatatgaaagcgaatctagcaatacaagtaacagttctgaagaacaacattctggagactcacaacccccactcatctatactttcagctttgcttttgctgctcactctgtctacagtaccttctgcaccccgcacaggtgtcactcccctgctccccagagtaagacaatgccctttctccatgatgcatagcaccttggtaacaatctgccccactgtaataccactcctttacatgtttgaaattactgctagactggaaactccttgaaggtagagatgatgtcttccctggcatttaataagggtttaataaatgtctgttgaattgaaatgactctttatgtttgacacttaagatgaaaatcaacagataacaaaagaaactcatgcaaaaattaggaaaacaagaaaaaccacaattacgtatcaacccctgaccccagacttctggcaggagatataatattagtatggatgcaatctgaaatcctaaatattccatcaatgggttcagagtaaccacattgttcattcattcattaaatcattcaaggaatatctattagatgtctattatggactaggtacatgataaatgagaataataatttttttaatttatttttttgagactgagtctcaccctgtcgcccagtatggagtgcagtggcacgatctcggcttactgcaagctccgcctcccaggttcaagtgattctcctgcctcagcctcctgagtagctgagattacaggcatgcaccatcatgcccagctactttttgtatttttagtagagacggggtttcaccatgttggccaggctggtctcaaactcctgacctcaggtgatccgcccacctcagcctcccaaagttctaggattacaggcatgagccaccgcaccaggccatgttttatatttctacaatgttttacagtccatgtaacagtttcatccacagaacctaatcagaggaatatccggaaacacattgagtggttgcatttcctaagatcatacaaaagtgagaaatctggctcttctgaccgatgctatgcttactgttctttttacaaaaacttccattcagaatgatacctctgaagaattgcatgcttctcaacaagcaaataattgaatttttcaaccttcaaaacttcaatattctgctcacataccatgacagctaatgaattttactctacagagattttttcatagaagcaggcatttgcacacaagaatctctctgtgtgactggtcccctgggctttgtccaagggcagaaagctcacttagttattaagataaatagcaaagggaagccaaacagaagctaaatgaattctacaatttttctcagtcttgcagagttgtggaaagtcaagttttccaaatctactcctcactaatatatgctgcaagactgacttagaggcatccttacatgggcatttattaaaagcatttattaaaggcatttattaaaagcccctattcaaaataaggaaacactagtgtagatttggaaaacccagaaataattagctacactttgtcaactcagaacttagaagtggtcaagctaaaatttgatttgggatttattacatttattttctgcagttttatgtggaattggctctctctctctctatatatatacataatatatatatatgctatatatatacataatatatatacataatatatatatagtatatatagcatatatatactatatatatacataatatatatatatagtatatatatagcatatatatatataattcttaggaatgttcctaaatactcccttctccagaatgttaaagatcttctggcttgtccagcttcagcatgtacctgccctggcctccaacggggacccttgcaaaacttgtacttgagatttttgagcacttgaaagaggtacaaatctggttatagtgtttaaggatggtgatgggagaggaaagaagacattgtaagcaatatttctgggtattaaatatttagttgtttccaagaagttcaagtaaatgacttgttttaaaattacttctggttgtaccaatagtattctcttgactcttctaaaactaagccacacatgagttacatgatacatccccagccctctgaaggtatattgttgctcagcaaggttcgtaaaaaagcctatcaatccacttgcttttgttttgtttagtatttccaaaagaagagtaagcaaagtagcctgcaaacatacatgtcaactctcagtcttggtaatgataacattttaagatgcattaataatgtatcttcctgagaaatctcttgtggttttgcacttcagctgttttctcatcttctttccttggctttgtctcatgctgtcccagaaaccaaaaaaagctgtttcttttttgagatggagtctcgctctgttgcccaggctggagtgcagtggcacgatctcggctcactgcaagctccacctcccgggttcatgccattctcttgccttagcttcccgagtagctgggactataggctcctgccaccacgcacggctaatttttttttttttttttttttttgtatttttagtagagacagggtttcaccgtgttagccgggatggtctcgatctcctgacctcatgacacgcccgcctcggcctcccaaagtgctgggattacaggcgggagccagggcacccagccaaaagctgtttcttaaaggatcatttcaaacattagtgggtttgcatggaaccttccacgatgaagctccttttctataaaatcacactctaaaatataagctctaaaatactttccttgaagcattcagagtaaagaaaaagagaaaggacacctaattttaagccccttaaataaaactgagggtgtctttgttaaagaaaataattacctgaataaaagagatttcttttttcttaaggaaggtttccaacaatctggcacttgaattcattggagtattttgtatagtaagtttccatatggagttgtattggcaagaatcaaggagtgtggttttcaggtcttggaggtgattaggtttatatcatttcatttactgattggacagccagtctagctctgcctcatgtgagtgacaaccagaagtcctgcttgaaaatccgtaattcccacttccatatgaaacaaatggttcaacaagggaatttaagaggttcttggtgtgcactgggcattttagatagcatttgggatgagacggatctcatgtcataggacatgtatggtgtaaaatatttgttattcagtatatacacctcaatccagtttggtttcataattggaatcactgcagactatgaaccaatattgaactacctgggaataggagctgtttggctttataacaaaacatatttttttcaagcacaacttggggagatgccagatctttattataaacatggaaaccaacacttaattgctcttgagttttcctagactctatttccttattatccaatgggtagattccaatatatctacttgacattggagagaaaacatattctccaaggcagtggaagaaattcctatatttactaaatggaaattcctctatttgctttccaggcctcttttgaaaataaccacaggaagaaatgggatatactcttactgaatccaaactctaaagtacttttgcagattttgcagagtgaagacaaaagaagaaatggtgaccttctttttgcaataatggttctgatgacataaacatagactctttggtgacatctttgtcattctacaaagcattatgagaggcagaatagttactgatactagttcctaccacttatgaggccaccattacaactgcagtagctggatcttgccacagttgtgtaattgcagccaaggacttcattacttcagtagcattgggacaaaactgaaatatttacttttatagacataccaataatattaaaccttgcaaacgggaaaaaataaaaaggagtctgtaagtccctatggccaataaatcaagacttagccaattcatgatattttgatgttcacatggtaagtgaaattattttcctcttttccatctacccccactatccgtggcttctctccaattgtagttttcatctccttttcaaggtgagtgattttaggaggcacagtgttggattgaaataagatgacatgagactagattcttctacctcaataacttggtacctggtacctatggcaggtcacttaaaatcttttgatctattttctcacttctataatggagatgataatacttgctctgggaaaatcagatggcataatgtatgtgaaagtgttttaaaatttctaacctgttgttataatctgcagatgatataacttcctgcatagataactcaagagaatccacagataaattattagaattaacaagagttcagtaaggtggctgcaataatttcaatatacaaaagcaaagtgcatttctataaactttcagccagcagttgtaaactgtaatattaaaaactgtgccatttataattgcaaaataatatataatataccatacaaaatcaaaatatgcaatattttatgtagaaaattacacattttaactatcgtaagccactaaagaagcctgaagtaaaatgagagaaataacatgttcatgaatatgaagacaaaatatcaataatgatgttaattcttccccattttttacagattttttacaatttcaatcaaaatccaaactaattattttcctttgaagttgctaaggaaagggtccaagtgtccaagattttcttcgaggaaaacaaaaaacaggtagagagacctgccctgcccaatgtcattaaaagaatgtgacaagggtgaaagaacaaagaaaactttgaaatgggacagaatttagctacagatccagatcatattggtgaaattgtgatatatgacagacctggcctcatagaataaagaacttcaattacccaacttaaccagtggcaaggggtggaggtggggcaagcccactgatgcctccttgggcccagcagaagacaacccttctctgcataccacagtacgtgagagaactccttgaaaatggaaacaacatgaaacctccattacaaaagacaatcctagcaattttctaatgtgttcaacataattaattcagaaaagaataattacaatgttcactaatcagtgaatctattctattccaaatattacaaaatagaaaacgtgtcttgccttgaaaaaatgaaatatatagtgagtattcaataggcaatatacttctacacactcataggttttgcccctaatattatttttatccttaaaagagggctggtctacttagaggaacacaatgcttaggtctgaggctcaatcaaacatgcaggacataacagagattttgtactatcctgttaatactgctatcaatagagcgaagcatagcatttggtagtcacagctggaaccctgtgcatatcccctagatccaccatggaggtccccaaaaactgtgataggtctgaaattttactctactttcaagcgaatgagtcattctgccagtttcatggatgctgttagaagacatgagacacctgagtccaagatcaaggacaatatattattcacaacaatagtaatagccagagcatcaccatttgctccagtccctccaagccccagtccctacaaggtgacttatgggagtcaggtgacacctgctcacataatggactgcattacaggacatcatctctgagcttagagaaccgaaatcttttgtgatggatggtaagtttgcctaacctttgtccctaaggaagacattctcttccttagggacagaaaacaaacctgcccttctctctagagggagacatgacctctatccctcttgagactgttcactaaacaaatatttttgaaaagatattccaaaagtgtgagtgcctctgttcacaagatgttagaaatgccagcgacacatggagaactgcctttcaatagaggtcagctgcagacagctcccctaaattcaaactgctccagggcgatctccggcaatggaagtctactaggtcacctgcactggtcaggctggaagtgcaggggaggtaagggcccagaaaaggttacagatgatggcataatacccctgcatcatcacccctcactgggacatttctgaattgtgttctacacaggccctcagctgcatttagccccactttcccacagcagtaaccaactcattaacatagcttctattagctttcctcctttccttgtcttccttactttctcactgtgttcctgcagttacctcccaaataaactacctgaactcaattcctggtcccagggtctagttctggaaaatccataccaagacagatagagcaaagaaataaacccacatcagttagtgtccataactgacatctttactttgtgatgtgtagacacagcctaaaaaaatggaagggagtcatactttaaagatctttcctgtattaagatggtccctgattcagagttatatgatggtccaaatcttcattattctgcagtcttagctgtattaaagcaagataatcctaaatttgatgcagctgaacctcctgccatagattcaatagatttactgaagactttagtaaggctgcgggccagggaatgagctcatccttcaaaaatatgcctcggcctcttgccactccagtactttcaaaagcagcagggcaggaataaggaattggcttggcataagccagtggatccaaaatccagtgcatgtaaacacacaaattgcttgtgggttactagagctgggcaacaatgtctgactcgtcacatccaccctagggttcctccaagctcctccatatggtatactacagccaaaaagagtatgtcttggagtagcaccaactaaactgtgtatattgtgacaagctacatctctccaagatttattttcttcatttatcaaaaggtagtgataatatctacatctcatggttttgttttaagagttatatgtgataatataaataaagcttaggccacaggttccaatttcttttatttagcatgtatttcctgagcgctgatcatgtgctaggcattgttctaagagcctggggtacatcagcaaacaaaacaggcagagatttctgtcctcatggagcttacattctaataaggagagatagtaataaaaagtaaatataatatataagtaaattatttaggatgttaatggtgataaattctaaggagaagtaaaaactatagcagggtagggaaacatcaggaaagaggaggtgggatggggtggggtgaggaagcttgcagtattagataatgtggtcagggtaggcttcaatcagagtttgagattagagaaaatattcaaagaagaggagggagttggagtacttatatctgggggaagagtgctccaggaaaagacataaatatattttaatgaacattaacttctactagccatctttatagtggctttttaattgaactgaacaatattgacaataacaataaaaaacacggtaaacatttatttagtgctcatgatgtgccaagaactacttaggcttctcatctatcaactacatcgattctcataggaattcttcgagatatgactatctttcagagaagcactatcttattttttagataaaactgaagcaggcagaaattagtaaattgcttaaggtcacacagcaagaaagtagggaaaggaagatccaaacaacacattctgactcaagtattgagtgccaaaccactgtaccatactgcctttatttaattaaaaggacagttaaagggggctggaaaggctacctggtgggagttggggttgtagagaaatatctggactatcaaggggcatcagatatatttttggggtgatggaaatgtttagctattgttttgtggtggtcgtttcacaacaattatcaaaattcatccatttgtacacttgaaatggatgcagtttattaaactattgctcaataaaatgaactttgaaaaggggttctggaaagattagcttgcatatactgaaatcaccagtttcattcaccccaattaccctacagaacatctgtctttaattactcaagtttctaattcatgggccaagtgtgagttctgtattttgtcttaactcccttacttttccttgaggtgtgacttacatggtctatttaatatgtgaccattcacagacttcagccctaggttgtgcatttaatagtgagtagccaatgaattagtgttaaaaaaaaagtgttatagttgatccttgttcactgcttttgataggcagaattaaaagatggcctgcaagattcccatcccctggtatatacacctggtataaccccttcccatgtgagtgtaggcaggacctgggaatatgatggaacagtctgccccttgattaggttaccttctgtggcaaaggtgatgggatgttgctcctatgattatattacagtgtgtaagactccatagtagcctacaggagagagatgctcctgctggcctttgagaagtaagttgccagattgtgagagggcctgtgagatggtcacatggcaaggaacttcaaggggactctaggagcacagtgcaacccctggctgacagctggcaagaaaagggtatcttatttctgcaatggtaagaagctagattttgccatcaacatgagcttggaagaggatcctgagctgaagatgagacagcagccctggctgatacgttcacttagggtcataggacccttgtatgaccctgtatgatcctgagtgcaggatccagttaggtgttcctggcctcctgacccacagaaactgtgggataatgtatgtgtgctattttaagccactaggtggtactctcttatgcagccaaaacaattgaatatactgctccttaaaaagatccagtcattcatttaacatttattgagatcctgctgtgtgtaccactccagaatagcttcctcaggctggaattttccaccgtacttcccttggttggacctaattatatttaagtgcctcctcctgcattgtttgtgcagtttaccacagtcctaggagctagactacctgggttcaaatcccagttctactgtttactagctgtgtgactacaggtagattattacttctgtgtgcctgtttcctcatttgtaaagtgagaataataatggtgtctactccactcaaatgagcttatttattagtcaggtaaggttatgctggggtaacaaattaaccatggagcctcactggcttaatgcaatggaaacatatttttcagtgatgctgtgggttttcgggggctctacttcttgtagttactaatggactccagctgagcgagggtcctccaaactgagatgccaccatcttaacagattgcttagacagagctggagggtcatttactttcttggccagaaagtaatacatgctacttccattcacagtccatgctgcaaaaccagtcaagtgatctcacgtaactcaagctggttgggaagagacaaacaaagaaggagcccaccctgtggaaatcttttcatatacagagaagagccagtatacaggctgtggggaaggaattactgacatgttcacgaaagagtaagaagctcagtgtgacagttgtgtggtgactaaggacaagagttatagaagaaatcattggagagatagggaggggcaagatcacacagagtgagcaaaagcaagagagtgagagagacagaaagtgctgtctgggtcacctcttagactcgtagccacacaaaggggggagctatctgtgtttgtcacttctatcccccaagtgcctaacacacttgctggacactcagtagaacctcagacactttgtttactgaatgaatacatgaatgaggtggtggggttgacatacttgtctctctgaatttcattccccgggcctctctccaaggtacggactgcttcttgaccatcacaacgaagctttggaaacatatttcagggatgatgaagcaaacattatcttgtgtacaagacagttcagcagaacattatcaaggaaaccacattcctatcttgtaggctaaggatggagctgaaagatgtgactggactttagacttcctgcaggcagcaactcttccccactgcagcctctgctggctgagaaacaggggcctctctcaagaagaagcatatcagatctgaccagagactggccagaaagaacaccctgcagactgcctgaagcccagggctaggagggaggctgaaggagggacaatagcatctctggaagtcaaaatattttcttttacccagctgccaacttgcagagaaggaaattaaagcaaggctgctttcctaatttagagcgaggatattttccatatttttgtagagatattttatttatgagacacaaaaggaaccaggggatacagatagtaagagtgtctactggccttttaatgcacggtaggctgcacatttccttcttgtgctttagaaataggttcaataaaagaaagtccaacttgtgaaatcacacacatctaattctctttgagatttaaggccacaagttgtgacctgagctgagtcacagctgggtcgaagggaactgcctcatctcttctccacccacgacaatgccctctccatcaaaaaatatctaactgtgtttgtcccagattaacagcaagccttgggatgatgtgggaaagcgacctttgcattgtttgtacagtgtagtaatggcgtccttgtgtttcctccatcccaactgtctgaaaacactttccaaatttatttcagctgtggttaaggaataacagaatagaaacatagcagcgattttgtagtttaatgactcaatcaagaaagaaaacattaccatcgtgctgtgtttgacaattcactccaaatcgattaatttgatttttataatgagatttgggataacattctgattctccaaatcttagaaagcagccatttcatccctcaaatccaatataaaggctttacctgcatgggattcaaatttataatgttgtgtggtaaggattctatgatgcatttgcttccaacttttaaactcaaatacctatggtgacaccatcaaagctaaaaagtgtgagcaaaaactggacctctgccagcactttgctagactgtcacaggcgtttccactaactgcatggctgactgaaatggcttttaaaaggtagtggcgagacccttgaaagtacttgagtgtattcttgtatctctcctcttgcagtctgccccatggctgagaaatgcagtctgtcccagccagaaatctgggtatccatctttttactttatgattccttttaggtgtctcccattagcattggtggatttctctctttctgcatccagtacagaactgcaggatccaaagatcacctgagcagagtggaaggtggtgttggaggagtagggagacctcactatacagtgaagttacgtaacgtgcaaatatatctaccttgaattcaactatgggtgttctggaaaaggtgtgggtggggcgtgtggagagggaggatggagggaaaaatgggagaatgcctatgaaaaaacataattcaactattgtggttttctgttgttgttgttgttctttcatttgtttgtttgttgatacagggtctcactctgtcacccaggctggagtgcagtggcacgatcatggctcactgtagcctcaaacttctgggctcaagtgatcctcctgcctcagccttccaagtagctgggactacaggcactaaccaccatacctggctaactttttgattttttgtagagatggggtctcattatcttacccaggctggtgtcatgaactcctggactcaagaaatccctttgccttggcctctcaaagtgctgggattacaggtgtgagccactgaacccagcctgtaattcaaacatttgattacatgctacattgcactcatgagtgtgtccccctgggagtgcacataactttgaaaatgtgattccattaaagtcatcacaactgcctgttcagtcggtgtctgtctttgcgtgcttcccacagacagcacctcactaagctaaactatgaaccgcatttagtgttcgaagtcatacattctttaaatacaacatggccttcaattataagtcaactgcttcgtagttggctgccaaagcaacagccatcttaaaccatgaaatgcccttcagaagaaagacatgtgctaggaagatggaggagggagcttgaagaaacctgggtcccaggtaaatgtgaagtcactattccagtctcatctaaatcagaaaataataacttcctatctttttcagctatggttactttgagtttttggatagatgcggctaaacctcatcctcatctacacattgtttacatgcaaaatgaattccaccttgagatataatataagaagcatgccctctttgtggctgaatataaaccacagtggaactttctccaaaaaaggaatatttacaaagctattcccttacctccaggtaagcagaaattatttaatattttattttaaaagaaatcactgcattcaatacaatgtatcttgctgagcttttcttgatcggcattttaagctcatatgattaatttttctgactttctgaagcacatagacatgaaaactgaaactaagtcacagataaacaaggagtacacacaaggatgtatcaaaaggcaaagaaaaaagtatcctaacactcaaacaaatattcataaactgtaattacaggggaaaaggcacaggatgttcctgcctgtttataaagattaacaaaccttggccaaacccttcttcttttccttatctccagtaattgccaagcaagttcaactgcaaagctaaagaatgtgccaatctcttctttcaagactttattcctctttgttttcactgctcattttcttcaatacgtcatcacaagttccttagacctacctttagataaaatgcttctgtttccttaactataatgagcttcatgtaaggagcaacaccaacatttatgaaaaatttgtcttccatttcttctaccaagttaaatacctggccctaaagtaatctgggtggccacctggtctggccatgtcattcttcagatgctacaaagagacatagtaagtgagctggcttccccatctatccacggcaaagtcagaaccggcttccaagcctagaacaatcttctgactgcaccaccttcatccctcacggttcatctgttatctttcagctttcttaatcttgtttgccaggtcgccacgcatcactcattactcactgatcttcgggtctatgatccttataactgcccatgccattacatactttataaatcagatactctcactgtcccttcccttttctacagaacttacttgtctacctttttatccctttaaataaaagaataatgatacccaattattgagcccgttgttactgtgttaacatgggctttgcgtgcaactctaattttgccctctcaatacttgtatgaagcaaaaaccacaggagataaggaaacttaggctcagagaagataagtaacttgctaaagttcccaagacactctcattttatgcttcaaccttctctgtagagtagcactgtccaatagaaatgtgatacaagccatatatgtagtttaaaatgttctggtagtcagataaaaaatgtaaaaataagtagttgaaactgactttttaactatatatttcatttaacccaaatatcccaaatcgtatttcaacatggaattgatgtaaataaataattattaataagatattttacattgttacagcacatctcaatttggacagtggattttcattagaaatacttgatctggacttagacttcataaaatatatgattgcaagaatagattcacatacccaagttgttccaaacgtacttaaaacttttccaaaaactgaacacagcatcacttttttaaaagtttaaatttcacttcattgcaaattatattaaattaaaatgaattcatcagtcacatgagccatatgtcaggtgctcaaaagccacatggtagtcagtggctaccacgttggatagcacagttctaaatctatgaatgcattcttccagacaaactcaactatattttcctacctgaactcatgcagacgagtatgtctcctcctcctcctcctcttcctcctcctcctcttccttctcctcctcctcttcctcttcctcctcctccatgagaacagttaaccctgcccatcttccgaggcccagttcagatgtcttttcctacacagagactttcctgatccactcaaaaggaagtaaacttctcctttgaacttgcagagcactttttctgggcctcttgaatgtcaatgatcatatttctctttgtagagtacacatttcctttcactcctgactcctgtactaccatctttggaaacccataaaggcttacctcaaaacaatgtaaaaagtagctcctaaaaatattttgtgcatgaatcactcaaaatgatttgtgagggaaatattaaaatgacacaagtctaagcctttgaaataaactatttactctccacaaacaaaaccagaagaggacaacttcggtaaaaaattataacctctttggtatccttatataggttgagaaagaatatgaaaaaaaaaaaaactattaccacacctcacttgttttaaattttataatagatacattggtttcacaaatccaggggcctttttgtttctctctatagacacaaagtcttgttctgtcacccaggctggagtgcagtggcacaattatagctcattgtaaccccaaactcctggactcaagctgtcctcccacctcagcctcctgagtagctgggactatgggcacataccaccacaccaggctaattttttgtttcttgtagagacgaggtctctctatgttgcccacactgatcttgaatccctggcctcaagcaatcctcctgccacaacctcccccagttctgatattacaggcatgagccaccacacccaaacacaaggggcatttttaaagtacatgtctatatatgtttcttacagtaaggcagaatgaatacccacaccagccttccacagaaaacaactagggatgttggataatgtattttaaagccctatttaaaatatgcatgagtggacaaaaaagtaaagaacacttatgtctcaaaataatcaggaagaacattgcagccctacagccagtgcttgccttgaagtcatttgttgaatgtggtgaatctaaattctgttttcctgacctcacaggattcagtggacaaaatgcgaattctaggcttgcccatggtaacaagttgaatgggacagtccttcccataaagctgggactcagccaggcatggtggctcatgcctctaaccccaacactttgggaggcctaggcgggaggattgcttgatcccaggagttcgagaccagcctgggcaacatgatgagaccccatttccacgaaatatttaaaaattagctggatgtggtagcactcaccacaatcatggctcactgcactccagcctgggcaacagagcaagaccctgtctcaaaacaaacaaacaaaaaaaaacactctgggtctctaaaaaggatgtatctttatggtaagggagaacagccctctctcaaccaaaggcaggaaaatttcctaccttaaactttgcaagtgaaaacaactcttaacacaaatcacagtagaatggatatattatggtatatacatagaatgaaatgccacaaagcaacaaggagcaatggactacagatgaatgcaacactgaggctgaaactcacaaatataacgataagcaaagaatcagacacaaaagggtacactgtagatatccatttatataaagtacaaaaatggccaaagctggtgagacacagtggctcatgcctgtaatccaagcaatttgggaagccaagatgggtgaatcgcttgagcccaggaatttgagaccagcctggccaacatggcaaaaccccatctctactaaaaatacaaaaattcgccaggcttggtagcatgcacctgtagttccagctactcaggaggctgaggcaggagaatcacttgagcccgagaggcagaggttgcagtgagctaagattgtgccactgcactccagcctgggcaacagaacaagactctgtcttaaatgaatgaatgaataaataaataaataaataaataaataaataaataaataaataaatggccaaagctaactgatggtggtagaggtcagaatattagcaacctttggagatggtgggttggagatcatgattgggcacaagggaggtttgtaggattccaatgatgttctatttcttgatcagggtgctagttatatgactgttattacttggtgcaaattcatgaagctgtacatttataatttgtatacttttgtgtgtatacatttcaatataataagaaatgaaacaaaaatgaaactcaacgaacagtttcaaaggtagattaagcatagctgaatcagtaacctggatgatacatttgaagaaattatgctgaatgcagctcagcccctgccccttcatttcacagtaatctttctaaagccttctgccttctctctttcatcggctttttctcttccacctctgttccttaaatcctggtaccttctagtgttctagccatcacgtccttcttttcttaaccacaaattttattttgaatctactcaatagttaatgaaaagtaatatttttaaaatgtaaagaacatttatctgagatggacattgttggcaaaaatattaatcaagtggtatctgtttagtagcagaagtacttaaaatatctgaaatgacttctagaaaacattttctaatctgttttttgctttccagtttgagaaaatttcttccaacaaagtccgaaacacagaattgatgctaagtggcaatttctaaatgacaaaaagggaaagccacaaaaatgtagttatgtcaaggtactatgcaatgaatgtttgtatccctttgaagtggatatattgaaggcctaatacctaatgtgacagtatttgagggtggaacctttgagaagtaattaggtatgagggtggagccttcatgaatggaattcatgtcttataaagacactaatgtagaagaaacatgagagagatgatcatgatgatatgagtgaaggcaggcatctgcaaatcaggaagaaggtccttagtagacacagaatctgccagcaccctgatcttggacttcccagcctccagaactgtgagaaataaatgtttactgttcaaaccacccagtctatggcatttgctagagcagcctgaactggctaagacacaacaaaaattaagtcttttagaatatgataatgctttttaagaaactatgtcagaattctaggaagataatctgcacataaatcaggcctttcttagaaaacaaatgtgatgatgttattaaaaataaatgattcaaagcaatctttaaggcaattctatttctaattctagaaacttaattagttacttttctattttgctctttgaactgacgtattctgtactgttttaaacaaatttgattttttaaaaacacaagtaccatactatactcaaatgtgtgcatacctacatagatatgtgcatgcatatatgcccatagaatgctgacatagtctcctgaggagtcttttacttgaaatctcttgcagacttctaacaactctaatccactaaaatacagcccaaaactataagtgacaattacctctttgcaccccaggaactaaggtccaacctgggacctctttgcaacccaggaactaaggtccaaggtccaagggtgggaggatgtaaagtattagattttcacgctaattgcacacaatgcctacatacaaggaagggaataatagcagaagaaaagcctatcccaatgtcattctcataggtcacctgtccatttgctctcagtgggagttaattcccagaaactaggggggcacacttgtgagtcaaaagaggcaggagagagaggtgggtacatctgttctatctaatgggattcggttccacagtagagccagtgcccatgttgcataaacaggaggaagcagcctcagatccaggatacctttttttcaccatgatgaatagaacatcagtgcagaagggatgcagaagggaagatgggcctaactggaattatgtagtacatatggtgtgtatgttgtaagttgtaggtatgttgctatctggctagcacagttaaccaaatactgtaagtggacattgtaccctcaaatttcaagatacaatgttgttgaacattgataaataaatgatgaagctaaaccaatttccagcaatgtatttcccagatactttcaaaatgtcagtttaccaagacctctcgtatttcatttcctcacaggtccttttggtatttcatcagaaatgactggctgatgggttcccttgtgaaagtgccccatttggacaagttaaatgagtaaacctggttaaaaaaatatattcaccaagagcctctgggcataggtacagtttccaagagcccaagcattcttggctacttgtaagtattattggaaggcactcaaaacaaacactccatttgcctgatcttcagcaaagaaaatatcagcctgtgtgagctaatgtggatgttattttagaattagcttcactgccatttcagggtagctaatactattgtcctcaactcaaagccttttgaacttagatttagaaggcaggcaagctgcaaagcttgtgactttgagtgttctagaaaaactcaaatatgagtagatttagcttggtcgtgcaggacactttcccttaacttactgaggtatttgtatcatggaagaagttgaaagattactttcaactgtaggaacagcaggggtagcttcacaggcatgaaaccaggcagtggctcagggcttcacagtacaaagggctctgtgctgagttaaatgctctgctgctgccatcttgaaattcttaatatttcttgaacaaggggctctgcattctcattttgaactgggccttgcaaacctggaaacagcaatgtggctttacttctacctccttcctagacaactttccttcttgtttgcatatacaggtttctctattcatattaaatataaaatgtatcttttagtagctgagtctctgaaaggtttggcccaccacaaggataaaaaacaggatgagagaacagtaaagtaaaatgataacattagaagaaatggaaactgggtacagggtatacaggaattatctgtacaatctttgcaacttttctgtaaatctaaaattattctaaaatataaagaccagctcatcatcaatttaaaaagaatgtagtaattataaagagacaattgtaaaataaccagaaacaacaacagtaacaaaagcctttcacacttgaaagttaaaaataaaaaagaaacaacagtattcttcttaaaaaatcacttgatcaaagaaaattaaaaatggaaattgtaaacttggaaatatattactattattttcataaccattaaaggatttaattagaattgtttaaatatagcaaaaaatatgtttaaaactcaacagtctacttttggaccacaacaataggaaaaatgaaaatccctttattcagaaatgtgcattaacgatatgtgcatgtgtttgtgtatgtgaataaattataaaattttgctaaatgatactaaagaagactgaagtaaatgaatcatatcctattgctggatggaaataattaatttcataaaaatatcagacttgtctaaagtaatacatttttaaaattctttctgtaatctgaaaaagataatgaaaaatctctgtacccctgggggatgcagggaatcatccttgggggaaggacaatgtaatagtctgatcctgagacccagggatacagggcctacctcaaactgaggctgaaccaggtcagcaatggcttaattcacttaaaaacatgtccccaggctcaaaaagctaggaaaggacagatccagggcttgagaccattcattcagtcattaacgcattcattaatccatcaattattttttgatcaccaactctgaccagggcattgttctgggggagagacagagcaacgaacaagacacataccagtttgctttcctgctttcttgggatatacattcaaaagggttaagcacagatttgagaatacaaaagcaacaaataaataggtttctccaccttggcactactgacactgggggaagaatgattccctgttgtgagggtggttctgtgcattgtaggatgttagcagcatccctggtctccacccactagatgccggtagcaccctccaccccagttgtaagaacaaaaaaatctccagatcgccaaatttgccctggggagacaaaatccctccatgttaagaaccactgacataaatgaattcaataatttcacatagtggtaagcaatatgaagaaaataaaattggatgatggacagagatggagaggcaccactttagactggagggtcacagaaggttgtttcaaggggagaaggccaagaatcaggcattgacatatgagggcagagagttctaggcagtgggaacagcgggtgaaaagttcctgaggtggtaaggagcttggtgtgttaaaggaacataaagaaaacagagtgactgaggtgtgatgacacagaatgcgtgagcaggggccagatcatacagcaacttagggtttatgcttgaaaagatgattcagttgctctttggagaacaatttgaggtagcctgaatagaaggggaaattggtagtctaggagaaagactgtgggagcagaaatagggttttagtgaaggaaatgggagtcactgaacagatctgtcacatggtgatgtggaggtaagaggccttgctaatagactggacatggacaacaagttccccttctcctttaggtgtctgccaagatgggtcccattgtctatattctgctggagatccacccctgcctccaactaggccagatgtgctgcattcctgtttgggctcaatctctaattcttggccccactctgtaccctcatcttctaataggtcacccctgaccgctgccctagtcagctccatggccagaaacctcatcttcccttagcctccctaccattttctcacatccggtttccctccaaacattgccagcacttgaagtctctcgggagctaaagctgaacattctgtttctatgattatagaaacccaagaattatcttcatcatgaattccagagaagagcctagggggtttctcagagtcatcttatgaacaaaagacatggtacatacaggggtcaaaaatgcaagaaagaggaatgtacagtacaacatagtaaccccaaaagggatatttaaacagtgattgaaatcacgggttgaattgtgtctcccaaaaagatatggtcaagtcctaaccccatgttacctgtgtatgtgaccttatttagaaatgggatcttcgcagatgtaattagttaagatggtcacattggattcgggagggccctaaatttgtaagggtgtccttacagaaaaaggaggggacacatacagacacaagcacacacaggaaagaagtccatgtgacaatggaggcagagactggagtcatgtaactgcatgttaaggaacatcaaggattgccaggagccactggaaactaggaagaggcaaggaaggaatctcccctagcaccttcacagggatcatggcactgctgacactttgattttggacttctggcctccagaactgacagagagaatacatttctcttgttttaaaacacccagtttgtagtcatttgttttggcagccctaggaaactaacacaatgcacatttagacagtttgggccaaaaaaagtacattttaagtacatgtgaatttcctgttgaaaagctatagcacagaatatttgaatgatgaaggttaatcagatgaagaactccagcagcttgaccttctgaattcagttgatattgaacacatatgccctgttaaagctgccttctcaacactccttttggctgctcaactgctccactagacccaagctcctggggtccaggctctaatgctgggttctttgcaaagtgaaattcaatatgtaccctctgggccctgaagcctgagtaccatgcctgagggagcctcagtaaaggttgattgagcctttgcatgttctgattaccctttcccacaagctgtaaacttgacaagcacacactactccaaagagacctggacagtcttctaaaggtgtcaccctcacaccacaccacagctgagtcagcaaaattccagggagtacacaacagtttcatccccaagtctgtctacagcgttatctattggtgcttctttgggtccacataccaccttttctagatctaatcaatgcttcttgtttacatccacctccatatccagctaatgaaaatttaaatggatgtataaatctcaccaaattataagtggaccaaggcattgtaactcagaagatggaatgctagacagcaagagaaatgttttggatggtggcacttctctggcatgctttcaactctttggcaggggacaagaagccctttttcttagtcatacagaagaataaaaatatgcaatcaaagggacaaattaaaattataaagcagtgaacaaatggcaataataatttgcctttcattttaaagtgtggcattctatggcatggctatggtttggatacagtttgtttgccctcactaaatctcatgttgatctctgatcctcagtgtggtggtgttgggaggtggggcttagtgggaaatgtttgagtcataggggcagatccctcatgaaggacttggtgccatttttgcagtagtgagttctagctcttgtgaaatggaattagttctcaagggaatgaattatttttcccaaaaatgagttgttataaatccaggatactcctgggtttggtccctctttgcatgtgcccacttcccttttgaccttttctgccatgttttgacacagcacagaagcccataccacaagccaagcagatgccagtaccatagtacttttatagcctgaagaaccataatctaaataaatctcttttctttgtaaattacatagcatcacatattcctttatcacaacacaaaacagacaaagacaggcattcaatattctgcagtattatcttcagtggtttaacagtattccataatagcgctatatgatcatttaatcaatccactattatagactgtttccattcttcttgtgccctatttttaaaaaatactgtgataacacatccttgaagctaaattttagcacacacccagggttatttctacaggataaatgtcttgatatgaacctatagagtttcaggaattaacatctttaaggcttttggttcctacagcttttgattcttattactgaattttttcctacccatgccaaaaaagttgtatgcatttgcacctccagcagcatatcttgagtgtttctttcccaatccaattaccagcattatatattatacaattttcatctttgccaaagttacccataaaaatggtaaaaagcatttgagtgtaatattaaagaaactacacacacacacacacacacacacacacacacacacaaacacacacacacagagctttcaagaaaataatcattgatctaaaaacttaaaagcttccagacaaaaacacaggagaatatcttttcgactttgaggtaggaaaacatttcctagaatataaaatttgatacacttcatcaaattaaaaacaaaaacaactcttgctcatgaaaagacatcattgctgaagtaaaaaaaaaaaaagcaccacagactaggagaaatttttaaaaacacatgtctaatgaaggacttgtatttagatttttaaaattcctacaaataatgcaaataaacaaaacaataggaatgggaaaaaagacgtgatcgagaaattctcaaaatactcaaactgtcaataaatatgaaaaggtgctcagcaaggagatgcatattaaagccacagagagattgaataagatatctgagacagtgttacaaggcaatcaaaagatataaaggacatacacattgaaaacaaaggagaaatactaagcttttttttttcccagaaaagacaatcatgtattaattatgtaggaagaaaatccagaaatctactttaaaaagccactagagctataagtagattgagcatggcctcaggatgcaaggttaatatccaaaaccaactgaatttctatttgtaatcaatgaaggattgaaagatgaaaccagaaaaacaatacaacgtataatttaatcaaagcacacaaaccactcaggaataaatttagccagatatacacaacaacctaaaaactgaaaatttaaaaatattactgaggaaagaaaaaagacaaataaatcaaaccataatttcagtgtaatctcaatcaaaatcccatcatcagttcttgcagacattataaaattgtattgaaataccaagaacccagattagccaatacattttgaataggaataaccaaattataggacttacagtgtctggtttcaagatttactataaagctacaaaaatcaagacattgtgtacagtgaaagacaggatgataattgcatgaagaaagacatatagaacaatgggacagaatagagaatccacaaacagactcataatatagtcaactgatttcaacaaaggtgtcaaaagtaatttaatggggaaaggagagagtttcaaaaaatgatggtataacaatgttttcttaaaaaattaaactgtccctctacttcacaccatatataaaaatgaattcaaaatgaatcatagacctaaatgtaattattaaaactataaaatgttttcaagataatatagaagaaaacctctgcaatcttgtggtatacaaagatttcttaagatacaagaaaaacccaacaagaacagatgaaaatattaaaaattggactccatcaaaatttaaaattcatgctctttgaaagatatcattaaaaaatgaaaaggcaagacatagactaggaaaaaaatatccacaatacttatatcagacaagtgacttgtttccagagtatacagagagatcttacaactcaaaaattgacaatttttcagttatgagaacttcaaatatgataaaaaaaaaaaaacaatttttcaagctggtaaaagatttggaaacttaacaaaataagataataaatggctgataggcacataagatatgatatttatcagcactattcatcaagaaaatgtgaattaaaacaagagataccactaaacttgctagaatttaaaactatactgtatgattactgtatgaatgacaaatgttggtaagaatatggaacaattggaactctcatgccttgctgatggaagcataaaatgtgacaaccctttagagaactgtatggtaatttcttataaagttaaacatacgcttaccatatatcccggccattttacttctaggtatttactcaagagaaaggaaaacatatgtccccaaaagaattgtacacaaatgcttattgcagctgttttcataatagcacaaaacagaaaacaactcaaatattcatccacagatgaacaagtaaacatattgtgatatgtctgtacagtggaatatgagtcaacaataaaaagaaattactgaaatacacaaggacatgcatgaatctcaaaaatatgttgagataaagaagctagaccaaaaaatacacatacaatatgattccaatgctaagaaattctagacaaacaaaactaatctgtagggtcagaaaatagatcagtggttgcctgctaccaggcactgactgggaaggggcatgaagagtttcttttatggtgatggaaatatttgatatcttgatgtggtggttacatggatatatatacctgccaaacttagtcaacctacacacttaagatggcatattttattgtatgctaatcatacttcaataaaagtgattttttttaaaaagagatataaatgcatacccttcagtatgactaaaattataaagactgcaagaccaagtgttggcaaagatataaataattagaactcctgtacattgatggaaaacttctttggcagttaaagttaaataaacagcttccctatgaaccagcaattccactcctagctttatacccaagagaaatgagtatgtatgtccacaaaaaggcttgtaaaagaatgttcacagaagctttatttgtaatagccaaaggctggaaactccccaaatatctatcaacaggagagtagataaacaaattgtggtgtgttcatacaatggaaaactacctggcaataaaggaacaaactaatgatgtccacaacaacttatagtctcaaaagcattgcgtacagtgaaagacacattaactcatacagtattattccatttatatggatttcaaaaacaggcagcactaatctatgtggatagaaattaggatggcagttgcctctgagcaggggaactaactggaagaggcataaggaaacttcctggggtgatggagatgttttatatcttaatctgggtaatggccatgtgcatttctcaaatttcttcaagacgtacactttaatattgctgtgttttactaaattgtgccttgcaaagcatgaaaaaaaacccataaaaataaaatttgaagccagaaagattggggggttgagagttcagcagagcttgtgttcatttgtgcttaatttctcattttcatagagatttcaaagatgctaactatcaagaatattcttcaccaacaacaaaattcttcctagagcaaagtgacacagagctctagtttcatgagggcacaaagaaacaaaaccaggagactgctgagcagtgtaagcccaaactctttgaactcatagaagggattctaaattgggaatccaaacattttctgtttcctagcagaaatactcatgcatgcaaaagctccaggcaggcaatggggctattgaaatggcaatctggccatgacagatgttttaaaatgcatttgaatccactcagtctccactttaacgaaaggcggctttctcccagagttactcataacaactcatgtagtctgtggtcacagttaatctgacttacagggtcctgagtttgaagggctgtgtcttggaaggtttctcacaggccatgagacaaacagtgcctgccgcacaagaagcaacacatctttcatggtgttttattgttgctatcatgaaatgtgaagtggtatgactgtacaaccagcaagggcaacatcccggttcagctcatcagaacacagctccaaagagatttaatgttggagacacctagtaacacattcatttctggagggtagcatccctctgatcaacaggtcattgtatacattcagctgcttaggaagtatctgcaaatgtgacattctgattacaggctggtactctatggcagatggaatctagatattttcaaacttagaactcttttcagggctggcttcatgggttcatgacctgtgcacacagccccatgctcagaagggctctgcacttggtttaaggctcatctctcgccatcttgaaattctaataattttttcaaaaggagcctcgtgttttcattttgtactgggttctgccaattatgtagccagtcccagctgatgctacagaagctcatctctcctggaccttgagactaaaagtgaaccttggccccactgctcttaatcaagagctaatctatatattaaatttggttcttaaattcactgggggtcgggggtataccgtggagggagaatctatgtaccagtctgcctttacatttgcaaatctggccaggtgatcccccttcaatttggctccacaaaaagccttaccttgaaatacacatgcttagggtgggagcaggatactgtgaaaatgaaaggaaggctgggcaaggattaagtcagggtaataatgaagggaaggaaaggaaagggaaatgtacgacagttgagctcttaattgttctcacttggatttctgcagtttattctttctctagtttgtttccctgcccgttttgcctatccacacaaaaacttgtgtgtgaatcttcatagcagcagtattcataatagcccaaaactgaaaacacaaatgactttcaactgatgaatgtaaaatgtgatatacacaatggtatgttattcggcaacaaaaagaataaagtatagatatatgatacgacatggatgaaccttaaaaacattatgctaaatgaaaaaagccagaaaccaaaaaaaatcacatactgtataattccatttatatgaaatatgcagaataggcaagtccacagagacagcaagtagattagtggttgccaggggctgaggatgagtaggtatggagtgggagaaatggggagtgatggctggctaatggatatggagtttctttgtggtgtgataaaaatgttctaattgattgtggttatggttgtacacctctgtaaatatactaaaagccatttaattatgcagttcaaatgcgtgaattgtataagtgaattacatttcagtaaagccatttttccaaaatgtaatgttaagtaatcattacagttttagcatgttagctgcttttcctccccccagtcttttttagttgaaataaccaagacacacagaaagaactcagcaatacacacactgtaactcaagccaaatttcccctgggttactaaataaacaatcatcagagttattgagtctctcagatgaattctggttcccatgatgctgcatcctgtacctctgctgtagttctcttatctagcaagagctcattgctgccctttctgccacaatgaatgtaaggaagatgacaagcaacatttatttcccttattttttagtttgttttattcaaataactcacaaatcagctgatcttttaggcaatgatagtattaataaatcttttagaaaaaaatcatcctaaaatatgtacaatatatgaaaggttaactgcatctggtcttaaaaatgcaaattactaggatctcccctggagtgctactatttacagaggattttttttcctctccctctaatattttcatggtgatactaactagaggctttcagaataggggctactgtggaatgctggagaattccttccccaggatcctccgtggctgtattactcaatgattcgattcccatgagcttctcttagggaagctaagagtaattttttttcacatgcacgcacacccacatataatgactgcaggccttaatccaactccatataatcaatttgcagaaagacacaaaagctaaaagaagggacagggcactatggaaagtagcagcaatgctgaaagtgctgtgatagaaacagcccaagttgtggtgccacggtgagtggagtacaagctaaccaacaggcagagtggggactccatgattgaaggatacgatgagtgcaccagaatacagtaatgcaggcatttcctagtggagtccttagagaaagaatgtgtgccaagtacagtggccaaataaactacaagacacccagttaaacctggttttggataaagaacacatacttttgtagtataactatattccaaatattgcaaaggatatattttactaaaacattgtttgttttctgagattccaatttaactggatgtcctgtatttttatttgcttaatctggcaaccctaattctaaggaaagaaagcctcagctcactaatggcaggtaaatgtgagaagggagaggaaattctgaatacaggtccagtattctttattcccctagcacagaggaaacaagacacaaatgacaaattaactcactaagaataagagtcacactaaatctggcaaactcccatgaagttcatagagttccacagcttagagggcatttcccccaatttagcaggtgaaacctggaagctacagttgcaggagcccagtgttctaagccggtggttctccaccaggagtggttttaacaaggtctaggggatatctgtcacaactttggtgggggaatgctggtggaattggcttcaagtggagaggggccagagatgctactaaatattctacagtgcgcaggatagtcccccacagtgaggaataattcagcctcaaatatcaatagtacttggggaggagaaactctactctcagctaaaaagtaagaaaagcctaaatggggaaaagaggaatggcactagaagtcatcactgacagctggcgtacccccagcagctgcagataaagagaatccagcagattccacacagtacctgggcagccaaaattcccgttctcacgtaagacctctcctggaggcaccctaatgagtttggggaatgtgcagagggctgatgagttggtgtcctgagatgttgacctctcagcatttttctttccatagggggccaccttccttgtgctcatactgtcctggttcacttggcaaccatcaagcaatgcccacccacaccgtggctctggggtgcagacttgatgctggtctggactgtcatggaccctgtggcagatgtccttggggctcagctcatatcccctccaagtccccagtgttatgcttagtggctctaacaggctcttactccaaacggccagccttgtgtctcctggttagagaactacccacagacttccagaatctcttttgcctgcacatgtgaagaaccaggagtgcccagaaatttatatcccctccccacagtgttggtggggtaatcccgatggggaacacagcactgagtggggtctacactgtccccagtacttctctgtggagttgcacttaagttatcctctggggggtgaattttatgagaccttgaactctgtggagcctccctctcttcttcatcccacttcctctaccattttttcccaagaatatttcctgaccaatccttttcctgttaatcctactctcagagactgcaccagaggaacacagtcgaaggcagaactcttcgtgctgccctcagcagatatgagggatagacatatgacccaaaatgggctgcagcagatattgaccactgccttaccaacaaccatctgtacacacaccctctcctgccatgcacacagaacttgcaatgtgttcaagaggcaggaacctttggtttcaggaaaagctgtcccttcacttagcctcagatgccgagccatgattgttgtaaaccactcatgttaactccgtcgcttcttgccaataattggtcttggagtggacacgtgccccacttctggccaatgggatataaagagaagtccactgggggttttagagtagagatcttctatcccccaaaataagagtgttgtcagaggaatgacctcttttctatcctttcttcctccttatgatgctgaggtgaagaagtgatgcttggagctgcaatcatgagcatgaactcaagagggttacaagacactgctcagctcctgctatcactgagtcactgactcaacccaagagccccttacctccaaacttctagctctgtgagataatcaaatgttttttttttttcttttcttttcacttaagccactgctgattactcttctgcttaccaatgaaaatatcctgagatgaaaggcaatcatagccctcccatgaaactggttaataaattggatgttgtaatagaaatggtctcacttcctttgggatcatgagctgtagggatggatgtctctgttggattgtgattatcttttatgactatagggagaaagacatatttagtggaagaagttaaagccagcagggagggaaacagagctgagagactgctcttatactaatgttaattcttatagtgacaccgtcttcaactctcttatctgtaaagtgggaataataattcctattatgcagggctgctatgagaataatttgaaataacatttcaaattgtaaagtgcctggttccacttctcttaaatttaaaaacctagagaataaggtattccaggcttatctgcaaag

SEQ ID NO: 667 - DNA, 3732 bp, Homo sapiens
gactctcctaaagggcagatgaagatcagagctttgcaccctgtgatgccattttaatcaaccctgcttggttttagaggattgctcccgtgggtcacttgaggcaggctccaccttccccaggaggagtggcagagtccagccagcgctcggagctggaggcccacgtgggagcagtgagcggctctgagatgccgcggcagtttcccaagctgaacatctctgaagtggatgagcaagtccggctcctggcggagaaggtgtttgctaaagtgctccgagaagaggacagcaaagatgccctgtccctgttcactgtcccagaggactgccccatcgggcaaaaggaagccaaggagagggagctgcagaaggagctggcagagcagaagtctgtggagaccgcaaaaagaaagaaaagtttcaagatgattcggtcccagtccctgtctctgcaaatgccgccacagcaagattggaagggccccccggcagccagtccggccatgtctcccacaacccctgtggtcactggagccacttccctgcccacgccagcaccctatgccatgcctgagttccagcgggtcaccatcagcggagattactgtgccgggatcactttggaggactatgagcaggcagccaagagtctggccaaggccctaatgatccgggagaagtatgcgcggctcgcctaccaccgcttcccgcggatcacatcccagtacctgggtcatccgcgggcggatactgcacctccggaagagggccttccagacttccaccctcctccactgccccaggaagacccctactgcctggatgatgcaccccccaacctggattacttggtccacatgcaggggggcatcctctttgtgtatgataacaagaagatgctggagcaccaggagccgcacagcctaccctaccccgacctggagacctacacggtggacatgagccacatcctggctctcatcaccgatggccccacgaaaacctattgtcaccggcgactgaactttctggaatccaagttcagccttcatgagatgttaaacgaaatgtccgagttcaaagagttgaagagtaacccccaccgggacttctataacgtgagaaaggtggacacacacatccatgcggccgcctgcatgaaccaaaagcatctgctgcgcttcatcaagcacacataccagacggagcctgacaggactgtggcagagaagcggggccggaagatcaccctgcggcaggtgtttgacggcctgcacatggacccctacgacctcactgtggactcactggatgtccacgcgggccggcagacattccaccgctttgacaagttcaactccaaatacaaccctgtgggggccagtgagctgcgtgacctgtatttgaaaactgaaaactatctgggaggagagtactttgctcggatggtcaaggaggttgcccgggagctggaggagagcaagtaccagtactcagagccacggctctccatctacggccgcagtcctgaggagtggcccaacctggcctactggttcatccagcacaaggtctactctcccaacatgcgctggatcatccaggtgccccggatttatgacatatttaggtcaaagaagctgctgccaaactttgggaagatgctggagaacatcttcctgccccttttcaaggccactatcaacccccaagatcatcgagagcttcacctcttccttaaatatgtgacggggtttgacagcgtggatgatgagtccaagcacagcgaccacatgttttccgacaagagcccaaacccggacgtctggaccagtgagcagaacccaccctacagctactacctgtactacatgtatgccaacatcatggtgctcaacaacctccgcagggagcgcggcctgagcacgttcctgttccggccgcactgtggggaagccggctccatcacccacctggtgtctgccttcctcactgctgacaacatttcccacgggctgctcctcaagaagagtccggtattgcagtatctctactaccttgctcagatccccattgccatgtctcctcttagcaacaacagtttgttcctcgaatattccaagaaccctctgagggaattcctacacaagggactgcatgtttctctttccaccgatgaccccatgcagttccactacacgaaggaagcacttatggaagaatatgccattgcagctcaagtgtggaagctgagcacctgcgacctgtgtgagatcgccaggaacagcgtgctgcagagcggcctctcgcatcaggaaaagcaaaagtttctgggacaaaattattataaagaaggacctgaaggaaatgatattcgaaagacaaatgtggctcagatccggatggcattccgatatgagaccttatgcaatgagctcagcttcctgtctgatgctatgaaatcagaagagatcaccgccttgaccaactaggtccagcatttgacatgcattttaactttttggttcaatttcaagtctgctgtggctaatagtggtcaagattccgaactaggactttcctctgtgaagaggatgcctctgaagaaattttaaactggtgattttggttgcactgctcactttaagagttaacatgctcacttgttagtatttctgagtaacaagatggtgacttctccttggggatctgggagctgagcacttgtctatacttgttcctaattttccaagtatttctcttgaaactgccagtgcctgaactgttggggccaggattttccctggtcagatgccaagtaacatgtggttttctgccatacttttctccagggccaggaggctaattggtagttgttcatttcagcctctggatggctggctgccttaaacacaatcaatttcaaagctccatttcataaaggggctactttgaaggagttaagatggaagacttccttcttgacaaattgtgtttttagttgaatttcttaaaccgttttatttagccctccttccctctttctagttggaagccaaatgtactcatgaaaacagccactcctattctgagtcttggtttcttcacctagaaagtgagggtttggactagatgagtggctttcagggtgttctgtgaatctcctcatgaatactttagggtgggggagggagtgagtgatgctcaggggctgtcaaagtgactgcgttcatcagtttacactggggctgctatataatattttcatttgaacgaagaacttcaaaaagcacaggactagatgatctctgttccttttggctctaatatgctacaactgtaggccaattatcactttaccaattaagagttaggccagataagtgaaatttaacttaagggcacacagctaataagtaataggcctaaactggatttccttattccaaatcctgtcttttccccactattccattagaccccacaaatgttagttgtgtgtgtgtgtgtgtgtttttaatcactgtaaccgggtgcatttttttaaggcaaaatttctcccttatctactgtgatgacttcagaagatacaatggtcccaggggccaagtagaaagcatttttaaagattaatctgaattaagctttatcagtgtactctttatctgtgttactagtgcctggtatgtagtaggtgctcaataaatgcatattgaataaccggaattc

SEQ ID NO: 668 - DNA, 1494 bp, Homo sapiens
atgacagttttcctttcctttgctttcctcgctgccattctgactcacatagggtgcagcaatcagcgccgaagtccagaaaacagtgggagaagatataaccggattcaacatgggcaatgtgcctacactttcattcttccagaacacgatggcaactgtcgtgagagtacgacagaccagtacaacacaaacgctctgcagagagatgctccacacgtggaaccggatttctcttcccagaaacttcaacatctggaacatgtgatggaaaattatactcagtggctgcaaaaacttgagaattacattgtggaaaacatgaagtcggagatggcccagatacagcagaatgcagttcagaaccacacggctaccatgctggagataggaaccagcctcctctctcagactgcagagcagaccagaaagctgacagatgttgagacccaggtactaaatcaaacttctcgacttgagatacagctgctggagaattcattatccacctacaagctagagaagcaacttcttcaacagacaaatgaaatcttgaagatccatgaaaaaaacagtttattagaacataaaatcttagaaatggaaggaaaacacaaggaagagttggacaccttaaaggaagagaaagagaaccttcaaggcttggttactcgtcaaacatatataatccaggagctggaaaagcaattaaacagagctaccaccaacaacagtgtccttcagaagcagcaactggagctgatggacacagtccacaaccttgtcaatctttgcactaaagaagttttactaaagggaggaaaaagagaggaagagaaaccatttagagactgtgcagatgtatatcaagctggttttaataaaagtggaatctacactatttatattaataatatgccagaacccaaaaaggtgttttgcaatatggatgtcaatgggggaggttggactgtaatacaacatcgtgaagatggaagtctagatttccaaagaggctggaaggaatataaaatgggttttggaaatccctccggtgaatattggctggggaatgagtttatttttgccattaccagtcagaggcagtacatgctaagaattgagttaatggactgggaagggaaccgagcctattcacagtatgacagattccacataggaaatgaaaagcaaaactataggttgtatttaaaaggtcacactgggacagcaggaaaacagagcagcctgatcttacacggtgctgatttcagcactaaagatgctgataatgacaactgtatgtgcaaatgtgccctcatgttaacaggaggatggtggtttgatgcttgtggcccctccaatctaaatggaatgttctatactgcgggacaaaaccatggaaaactgaatgggataaagtggcactacttcaaagggcccagttactccttacgttccacaactatgatgattcgacctttagatttttga

SEQ ID NO: 669 - DNA, 2850 bp, Homo sapiens
gttgtgactttccctttcgaattcctcggtatatcttggggactggaggacctgtctggttattatacagacgcataactggaggtgggatccacacagctcagaacagctggatcttgctcagtctctgccaggggaagattccttggaggaggccctgcagcgacatggagggagctgctttgctgagagtctctgtcctctgcatctggatgagtgcacttttccttggtgtgagagtgagggcagaggaagctggagcgagggtgcaacaaaacgttccaagtgggacagatactggagatcctcaaagtaagcccctcggtgactgggctgctggcaccatggacccagagagcagtatctttattgaggatgccattaagtatttcaaggaaaaagtgagcacacagaatctgctactcctgctgactgataatgaggcctggaacggattcgtggctgctgctgaactgcccaggaatgaggcagatgagctccgtaaagctctggacaaccttgcaagacaaatgatcatgaaagacaaaaactggcacgataaaggccagcagtacagaaactggtttctgaaagagtttcctcggttgaaaagtaagcttgaggataacataagaaggctccgtgcccttgcagatggggttcagaaggtccacaaaggcaccaccatcgccaatgtggtgtctggctctctcagcatttcctctggcatcctgaccctcgtcggcatgggtctggcacccttcacagagggaggcagccttgtactcttggaacctgggatggagttgggaatcacagccgctttgaccgggattaccagcagtaccatagactacggaaagaagtggtggacacaagcccaagcccacgacctggtcatcaaaagccttgacaaattgaaggaggtgaaggagtttttgggtgagaacatatccaactttctttccttagctggcaatacttaccaactcacacgaggcattgggaaggacatccgtgccctcagacgagccagagccaatcttcagtcagtaccgcatgcctcagcctcacgcccccgggtcactgagccaatctcagctgaaagcggtgaacaggtggagagggttaatgaacccagcatcctggaaatgagcagaggagtcaagctcacggatgtggcccctgtaagcttctttcttgtgctggatgtagtctacctcgtgtacgaatcaaagcacttacatgagggggcaaagtcagagacagctgaggagctgaagaaggtggctcaggagctggaggagaagctaaacattctcaacaataattataagattctgcaggcggaccaagaactgtgaccacagggcagggcagccaccaggagagatatgcctggcaggggccaggacaaaatgcaaacttttttttttttctgagacagagtcttgctctgtcgccaagttggagtgcaatggtgcgatctcagctcactgcaagctctgcctcccgtgttcaagcgattctcctgccttggcctcccaagtagctgggactacaggcgcctaccaccatgcccagctaatttttgtatttttaatagagatggggtttcaccatgttggccaggatggtctcgatctcctgacctcttgatctgcccaccttggcctcccaaagtgctgggattacaggcgtgagccatcgcttttgacccaaatgcaaacattttattagggggataaagagggtgaggtaaagtttatggaactgagtgttagggactttggcatttccatagctgagcacagcaggggaggggttaatgcagatggcagtgcagcaaggagaaggcaggaacattggagcctgcaataagggaaaaatgggaactggagagtgtggggaatgggaagaagcagtttactttagactaaagaatatattggggggccgggtgtagtggctcatgcctgtaatccgagcactttgggaggccaaggcgggcggatcacgaggtcaggagatcaagaccatcctggctaacacagtgaaaccccgtctctactaaaaatacaaaaaattagccgggcatggtgcgggcgcctgtagttccagctaactgggcggctgaggcaggagaatggcgtgaacctgggaggtggagcttgcagtgagccgagatatcgccactgcactccagcctgggtgacagagcgagactccatctcaaaaaaaaaaaaaaaaagaatatattgacggaagaatagagaggaggcttgaaggaaccagcaatgagaaggccaggaaaagaaagagctgaaaatggagaaagcccaagagttagaacagttggatacaggagaagaaacagcggctccactacagacccagccccaggttcaatgtcctccgaagaatgaagtctttccctggtgatggtcccctgccctgtctttccagcatccactctcccttgtcctcctgggggcatatctcagtcaggcagcggcttcctgatgatggtcgttggggtggttgtcatgtgatgggtccctccaggttactaaagggtgcatgtcccctgcttgaacactgaagggcaggtggtgggccatggccatggtccccagctgaggagcaggtgtccctgagaacccaaacttcccagagagtatgtgagaaccaaccaatgaaaacagtcccatcgctcttacccggtaagtaaacagtcagaaaattagcatgaaagcagtttagcattgggaggaagctcagatctctagagctgtcttgtcgccgcccaggattgacctgtgtgtaagtcccaataaactcacctactca

SEQ ID NO: 670 - DNA, 1091 bp, Homo sapiens
actgatcaatcccctccccggctgatttgcgcatcaggaggaggactgagcttatctgactccagagctttcaggagggaagaaagatgtcagatgaagatgatctagaagactctgagccagaccaggatgattctgagaaagaagaggacgagaaggagacagaggagggggaggactacagaaaagagggggaagagttccctgaggaaggacctgacagacatctacttgctgcgctcctacatccatctgcgctatgtggatatttctgagaaccacctgacagacctgtctccactcaactacctcacccacctgctctggctcaaggctgatggcaatcggctgcgaagtgcccagatgaatgaactgccctacctgcagattgctagttttgcttataaccagattactgacactgaaggcatctctcatcctcgtcttgaaaccctgaatctcaaagggaacagcatccacatggtgacaggtctggaccccgagaagttgatcagcctgcacacagtggagcttcgggggaaccagctggaaagcaccctgggaatcaatcttcctaagctgaagaacctctacctggcccaaaacatgctgaagaaggtggaaggcttggaggatctgagcaatctcaccaccttgcatcttcgagacaaccagattgacaccctgagtggcttctccagagaaatgaaatcattgcagtacctcaacctgaggagatcaaagacgctggccttcagacctgatcagactcccaggggcagccaccacatgtatgacagaggacagaggatgcctgtttttgccccaaagctggaaattcatcacaacctgaggcccaggatctgctctgtgccggtcctctgggcagtgtggggtgcagaatggggtgcctaggcctgagcgttgcctggagcctaggccgggggccgccctcgggcaggcgtgggtgagagccaagcccgcgtgggccgcggggtgctggtaggagtggttggagagacttgcgaaggcggctggggtgttcggatttccaataaagaaacagagtgataaaaaaaaaaaaaaaaaaa

SEQ ID NO: 671 - DNA, 905 bp, Homo sapiens
gttctagatcgcgagtggccgccctttttttttttttttttgcaggaaggaattccatttattgtggatgcattttcacaatatatgtttattggagcgatccattatcagtgaaaagtatcaagtgtttataaaatttttaggaatggcagattcacagaacatgctagtcagcctgcagtattcctccagaagagctaaccagggcagggctggcatgagaagtgacatctgcgttacaaagtctatcttcctcataagtctgtaaagagcaattgaatcttctagctttagcaaacctaagccaaaggaaggaaagccacgaagaatgcagaagtcaaaccctcatgacaaagtaggcacaagtctacaataagctaaatcagaatttacaaatacaagtgtcccaggtagcattgactcccgtcattggagtgaaatggatcaaagtttgaattaaggcctatggtaaggtaacattgctttgttgtacttttgaacaagagctcctcctgatcactattacatatttttctagaaaatctaaagttcagaagagaatgtatcactgctgacttttattccaatatttggatggagtaagttttagggtagaattttgttcagtttggatttaatcttttgaaaagtaaattccttgtttactggtttgactataattctctgttatctttacgaggtaaaactgcaagctgactagcatgttctgtgaatctgccattcctaaaaattttataaacacttgatacttttcactgataatggatcgctccaataaacatatattgtgaaaatgcatccacaataaatggaattccttcctgcaaaaaaaaaaaaaaaaaaaaaaaaaaaaaaaaaaaaaaaaaaaaaaaaaaaaaaaaaaa

SEQ ID NO: 672 - DNA, 5059 bp, Homo sapiens
ctggttctcaacttcttttgaaataatgttcatagagaaggagggctgtctgagattcgagggaaacaagctctcaggacttccggtcgccatgatggctgtgggcggtaaacgcggttagtgcaagcatctgggccatcttcaatggtaaaaaagatacagtaaagacataaataccacatttgacaaatggaaaaaaaggagtgtccagaaaagagtagcagcagtgaggaagagctgccgagacgggtatacagggagctaccctgtgtttctgagaccctttgtgacatctcacattttttccaagaagatgatgagacagaggcagagccattattgttccgtgctgttcctgagtgtcaactatctgggggggacattcccaggagacatttgctcagaagagaatcaaatagtttcctcttatgcttctaaagtctgttttgagatcgaagaagattataaaaatcgtcagtttctggggcctgaaggaaatgtggatgttgagttgattgataagagcacaaacagatacagcgtttggttccccactgctggctggtatctgtggtcagccacaggcctcggcttcctggtaagggatgaggtcacagtgacgattgcgtttggttcctggagtcagcacctggccctggacctgcagcaccatgaacagtggctggtgggcggccccttgtttgatgtcactgcagagccagaggaggctgtcgccgaaatccacctcccccacttcatctccctccaaggtgaggtggacgtctcctggtttctcgttgcccattttaagaatgaagggatggtcctggagcatccagcccgggtggagcctttctatgctgtcctggaaagccccagcttctctctgatgggcatcctgctgcggatcgccagtgggactcgcctctccatccccatcacttccaacacattgatctattatcacccccaccccgaagatattaagttccacttgtaccttgtccccagcgacgccttgctaacaaaggcgatagatgatgaggaagatcgcttccatggtgtgcgcctgcagacttcgcccccaatggaacccctgaactttggttccagttatattgtgtctaattctgctaacctgaaagtaatgcccaaggagttgaaattgtcctacaggagccctggagaaattcagcacttctcaaaattctatgctgggcagatgaaggaacccattcaacttgagattactgaaaaaagacatgggactttggtgtgggatactgaggtgaagccagtggatctccagcttgtagctgcatcagcccctcctcctttctcaggtgcagcctttgtgaaggagaaccaccggcaactccaagccaggatgggggacctgaaaggggtgctcgatgatctccaggacaatgaggttcttactgagaatgagaaggagctggtggagcaggaaaagacacggcagagcaagaatgaggccttgctgagcatggtggagaagaaaggggacctggccctggacgtgctcttcagaagcattagtgaaagggacccttacctcgtgtcctatcttagacagcagaatttgtaaaatgagtcagttaggtagtctggaagagagaatccagcgttctcattggaaatggataaacagaaatgtgatcattgatttcagtgttcaagacagaagaagactgggtaacatctatcacacaggctttcaggacagacttgtaacctggcatgtacctattgactgtatcctcatgcattttcctcaagaatgtctgaagaaggtagtaatattccttttaaattttttccaaccattgcttgatatatcactattttatccattgacatgattcttgaagacccaggataaaggacatccggataggtgtgtttatgaaggatggggcctggaaaggcaacttttcctgattaatgtgaaaaataattcctatggacactccgtttgaagtatcaccttctcataactaaaagcagaaaagctaacaaaagcttctcagctgaggacactcaaggcatacatgatgacagtcttttttttttttgtatgttaggactttaacactttatctatggctactgttattagaacaatgtaaatgtatttgctgaaagagagcacaaaaatgggagaaaatgcaaacatgagcagaaaatattttcccactggtgtgtagcctgctacaaggagttgttgggttaaatgttcatggtcaactccaaggaatactgagatgaaatgtggtaaatcaactccacagaaccaccaaaaagaaaatgagggtaattcagcttattctgagacagacattcctggcaatgtaccatacaaaaaataagccaactctgacatttggattctaccatagactctgtcattttgtagccatttcagctgtcttttgattaatgttttcgtggcacacatatttccatccttttatgtttaatctgtttaaaacaagttcctagtagacaccatctggttgagtcagttttttttatggtgtattttgaacccattctgatagtctcttttaactggaagatttcaattacttacgttaatgtaattattaatatgttaggatttatcctcagtcagccagtttgttatgtcttttctattctactgttatcacatttgtaccacttaaagtggaatctaggcactttatcaccatttagatcctattaccttttctcatctaggatatagttatcttctacataatctttctgtatcttaaaacccatcaataaattattatatattttctacttttaatcactcagaagatttaaaaaactcatgagaagagtaatctgttatgtttttccagatatttaccatttctgttgctcttccttcattattttccaaatttcgttctgcaaatttccacttcttctgatagacgttttttagttcttttagagtggttctgataggtacagattctcttattttttgcttcctctgaggacatctttttctcaccttcattctcagtgatgttttttgcttgtagtatttttagttgacattgttttctgttcagcagtttccttttagcttccgtatttcctgatgagaaatctgcagtcattcaaattgttgtttccctgtatgtagtgtgtcatttttctgtcagatttcaaggtatttatctttagtttttagccatttcattatgttggggatgagtttccttgttttattccctttggaatttgctccaattcataaatttgcagttttatgtcttttaccaaacttagaggttttcagcctaatttctaaaaatactttttattagcctgattttcatctttataggaaatagtttaagtgatgacaagttccaatagcttatatgcccagaaggccttcaaaataagaattttgaaagaatacagaaaacaaacttttatatccttctcatgtcttctactgtaaaattcatatgctttgctactctaaacctagtttgaaatcaacagtcttgagaatagatgaaaattttgatgaatagtggaattcttttaaatggaaacctcttacatgtgattttccttgccatctagaaataaaccatagtatttatgttgaatcaatcaatattatattttgtttttttcctcctcttctgagactcttattgtggaaatgttagacttttatgttttcctaaatgtccctgatattctacttatttagaacatcttttcattttttccattattctgattgggtaattttaatttgtctattttcaaatttgctggagtgttcacctgttgttgtctgtgtcgtcccactgagtgcattcaccaccttttaaattttggtcactgtatgtatcagttctaaaatttccattttgttctctatattttaaatttcttggcttatattctattttcctgcaaatgtgtcagcatttgcttgtttgagctttttttttttcaagacagggtctcaactctgttacccaggctggagtgcagtggtgcgatctcagctcactgcaacctctgcctcctggttcaagcgattattgtgcctcagcctcctgagtagctgggattacaggcatgcaccaccacagcccagctaattttttgtatttttagtagagacagagttttgctatgttggccaggctggttttgaactcctggcctcaagtgatccacccacctcagcctcccaaagtgctgggattacaggccactacacctggcacatttgagtattttttttttttttttttttttgagatggagtctcgctctgtcatctaggctggagtgcagtggtgtgatctcagctcactgcagcctctgtctcccgggctcaagcgattctcttgcctcagcctcctgagtagctaggactacaggtgcatgccaacacgcccggctaatttttttaaaaaatatttttagtagagacagggtttcaccattttggccaggatggtctcgatctcctgacctcatgatccacccgcctcggccttccaaagtgctgggattacaggcatgagccaccgtgcctggcctcatttgagtatttttataatgtctcttttaaagtctttgtcagataattccactgtacatgttattcagtgtttggtgtccactgagttgtcatttgccagacaagtggagatttttgcagctcatccttgtattctcagtagttccgatatgtaccctcgacatgtgaatgttatcttatgagactctgttttatttgtatccaacagaagatgtttattatttatttggctttctgtgaactgaggtcttaatatcagctcattttaaaagtctttgcagtggtattcggatctatcctgtgtgtgcctatgagattgggtgcagtgtatcctgttagctccattctcagggcgtttgaatgtgaattaggaccagcgcaatgaatgctcaagttggggttgggcgttagaattcataaaagtctttatatgctcag

SEQ ID NO: 673 - DNA, 2177 bp, Homo sapiens
tttgttcggctgaggggagggccgttggccggggcctgcggtacgccgcttcagtgagggacgccactgcggccacccggcttgctgccttcctgggcgccactcccccaggcgacccgacgcgacgcgccagtagcgcagcaccgattcctctcgggctcttgggcgctgctctgagcagcgtcaccctttacaccagaaagctggcgggcactatggggaaaaaacaaaacaagaagaaagtggaggaggtgctagaagaggaggaagaggaatatgtggtggaaaaagttctcgaccgtcgagtggtaaagggcaaagtggagtacctcctaaagtggaagggattctcagatgaggacaacacatgggagccagaagagaacctggattgccccgacctcattgctgagtttctgcagtcacagaaaacagcacatgagacagataaatcagagggaggcaagcgcaaagctgattctgattctgaagataagggagaggagagcaaaccaaagaagaagaaagaagagtcagaaaagccacgaggctttgctcgaggtttggagccggagcggattattggagctacagactccagtggagagctcatgttcctgatgaaatggaaaaactctgatgaggctgacctggtccctgccaaggaagccaatgtcaagtgcccacaggttgtcatatccttctatgaggaaaggctgacgtggcattcctacccctcggaggatgatgacaaaaaagatgacaagaactaacgctcctgagtaccagcccctgtcacatctgactgtgggtttcaagtgggaagggaaggagttctacttgtcttgacaccatagaggtggcttgagaagatgtcctttgaagagccagtatagtttctgtgccctgcagcagcccaagtgctttaaagccgtttcaagctgtatagtttgcacacccatcccagtggaggggaaaggggataagtgtttcaaggcaaccttttctgcactttgctgcgaaaagcaaagggccttctatgaaggacaaaacttgcagaattgggtgtgtgggagagcaaaaaaatactgtagatcttcaaagagcatctccacaacccacagccttcttcccaatagtgttaactctgcatttttacagcgtagcatgtgtgtagtttttggctattactggtgtattatttgggggagggagggatggggaggggagaaagggagatgggtagcatcattttgattaacatttggggcctgataggggaaatggtgaagcaatggaaaagaacagacaactaatgatttgcttctatgtccagaatattttacctttaaaaaaatgtcattggcaccataaataaggactgtgagagactgtttaaaagctgtgaaagtctaaaacctataagccaaggtgttccctgcctaaacttattgctgttcccacaaaggactaagcctgttcataagttaccaaagttgccattttggagatggaaattgacgaggagggaaggtcttttattggagagtatacagtacaagcagatcattctgccttagaggtgctaattcccgaaattagaagaccctttcttttccagtaacgaagttataaatatcagcttgttcatccaagccactggctgaggtgttaggaagaggaagagggtggtagaggaggtaagacagtagggaaagacaagggcccatgctcttagtggggaaaactcttggagccgtttactttgagctttgaacactgaaaccattgttggcagggttcagtcactgacagcacaagtttcactgaattgatccaagagtttagtgatttcaaaagccttggtctcaggagaagattaaactttcatattgggcagtggttcactttaaaacacacacatacacacacaaaacaattttttaagaaatcctaataagtaacatacccaaaatgctctgtcttgagtcatgagaaccatcagttcttgatattgtctagacttgcatctagagctacgttgtaaaattcttttaggcatgtgttagatttctgtgtaaactttgtttaaatgtaaacttcatactacattgtcagtttttgtcttaataaaactatagatttataatccctgaaaaaaaaaaaaaaaaaaaaaa

SEQ ID NO: 674 - DNA, 639 bp, Homo sapiens
ggttagcggagcaatgcgcaggaataaggaagcgacctgcaaccgacggtaatgaccctttcccaaccatagaatgtgtttggggccccgctttgcctgctggagggtgttaaccttagcttgcttttcggcgtattctgatttagctttgggagagctaactttattggtcttaggtgttcagtgctacctggcccactgcttgtctgtttgtgacttttaagtcagaaactggagatggtaagatccgataatttccctaacttaatacatcgcggtccctctcactagcaactcctaggtatgtgacaaagttgggatgtttatcaacggtccgcctcctggctagggaaagagctctggggcggagaatgcactttctgttttttgaaaacaacctcattttgtgcccttaaaagccactggggatgacggatccaggattgtgggtggaggtagtgggtttttcatcccctgactatggggccaacttctgccagccattgttttttctaataaagattgtgtgttctttttaaaaatttcccctgcgcttagattcttctactcaaaacaaaagagccaacagaacagaagaaaatgtttcagacggttccccaaatgccggttctgtggagc

SEQ ID NO: 675 - DNA, 5929 bp, Homo sapiens
agaggccctccgcgccccgagctccagccgcactgccccgatggctccctacccctgtggctgccacatcctgctgctgctcttctgctgcctggcggctgcccgggccaacctgctgaacctgaactggctttggttcaataatgaggacaccagccacgcagctaccacgatccctgagccccaggggcccctgcctgtgcagcccacagcagataccaccacacacgtgaccccccggaatggttccacagagccagcgacagcccctggcagccctgagccaccctcagagctgctggaagatggccaggacacccccacttctgccgagagcccggacgcgccagaggagaacattgccggtgtcggagccgagatcctgaacgtggccaaaggcatccggagcttcgtccagctgtggaatgacactgtccccactgagagcttggccagggcggaaaccctggtcctggagactcctgtgggcccccttgccctcgctgggccttccagcaccccccaggagaatgggaccactctctggcccagccgtggcattcctagctctccgggcgcccacacaaccgaggctggcaccttgcctgcacccaccccatcgcctccgtccctgggcaggccctgggcaccactcacggggccctcagtgccaccaccatcttcagagcgcatcagcgaggaggtggggctgctgcagctccttggggaccccccgccccagcaggtcacccagacggatgaccccgacgtcgggctggcctacgtctttgggccagatgccaacagtggccaagtggcccggtaccacttccccagcctcttcttccgtgacttctcactgctgttccacatccggccagccacagagggcccaggggtgctgttcgccatcacggactcggcgcaggccatggtcttgctgggcgtgaagctctctggggtgcaggacgggcaccaggacatctccctgctctacacagaacctggtgcaggccagacccacacagccgccagcttccggctccccgccttcgtcggccagtggacacacttagccctcagtgtggcaggtggctttgtggccctctacgtggactgtgaggagttccagagaatgccgcttgctcggtcctcacggggcctggagctggagcctggcgccgggctcttcgtggctcaggcggggggagcggaccctgacaagttccagggggtgatcgctgagctgaaggtgcgcagggacccccaggtgagccccatgcactgcctggacgaggaaggcgatgactcagatggggcattcggagactctggcagcgggctcggggacgcccgggagcttctcagggaggagacgggcgcggccctaaaacccaggctccccgcgccaccccccgtcaccacgccacccttggctggaggcagcagcacggaagattccagaagtgaagaagtcgaggagcagaccacggtggcttcgttaggagctcagacacttcctggctcagattctgtctccacgtgggacgggagtgtccggacccctgggggccgcgtgaaagagggcggcctgaaggggcagaaaggggagccaggtgttccgggcccacctggccgggcaggccccccaggatccccatgcctacctggtcccccgggtctcccgtgcccagtgagtcccctgggtcctgcaggcccagcgttgcaaactgtccccggaccacaaggacccccagggcctccggggagggacggcacccctggaagggacggcgagccgggcgaccccggtgaagacggaaagccgggcgacaccgggccacaaggcttccctgggactccaggggatgtaggtcccaagggagacaagggagaccctggggttggagagagagggcccccaggaccccaagggcctccagggcccccaggaccctccttcagacacgacaagctgaccttcattgacatggagggatctggctttgggggcgatctggaggccctgcggggtcctcgaggcttccctggacctcccggaccccccggtgtcccaggcctgcccggcgagccaggccgctttggggtgaacagctccgacgtcccaggacccgccggccttcctggtgtgcctgggcgcgagggtccccccgggtttcctggcctcccgggacccccaggccctccgggaagagaggggcccccaggaaggactgggcagaaaggcagcctgggtgaagcaggcgccccaggacataaggggagcaagggagcccccggtcctgctggtgctcgtggggagagcggcctggcaggagcccccggacctgctggaccaccaggcccccctgggccccctgggcccccaggaccaggactccccgctggatttgatgacatggaaggctccggggggcccttctggtcaacagcccgaagcgctgatgggccacagggacctcccggcctgccgggacttaagggggatcctggcgtgcctgggctgccgggggcgaagggagaagttggagcagatggaatccccgggttccccggcctccctggcagagagggcattgctgggccccaggggccaaagggagacagaggcagccggggagaaaagggagatccagggaaggacggagtcgggcagccgggcctccctggcccccccggacccccgggacctgtggtctacgtgtcggagcaggacggatccgtcctgagcgtgccgggacctgagggccggccgggtttcgcaggctttcccggacctgcaggacccaagggcaacctgggctctaagggcgaacgaggctccccgggacccaagggtgagaagggtgaaccgggcagcatcttcagccccgacggcggtgccctgggccctgcccagaaaggagccaagggagagccgggcttccgaggacccccgggtccatacggacggccggggtacaagggagagattggctttcctggacggccgggtcgccccgggatgaacggattgaaaggagagaaaggggagccgggagatgccagccttggatttggcatgaggggaatgcccggccccccaggacctccagggcccccaggccctccagggactcctgtttacgacagcaatgtgtttgctgagtccagccgccccgggcctccaggattgccagggaatcagggccctccaggacccaagggcgccaaaggagaagtgggcccccccggaccaccagggcagtttccgtttgactttcttcagttggaggctgaaatgaagggggagaagggagaccgaggtgatgcaggacagaaaggcgaaaggggggagcccgggggcggcggtttcttcggctccagcctgcccggcccccccggccccccaggcccacgtggctaccctgggattccaggtcccaagggagagagcatccggggccagcccggcccacctggacctcagggaccccccggcatcggctacgaggggcgccagggccctcccggccccccaggccccccagggcccccttcatttcctggccctcacaggcagactatcagcgttcccggccctccgggcccccctgggccccctgggccccctggaaccatgggcgcctcctcaggggtgaggctctgggctacacgccaggccatgctgggccaggtgcacgaggttcccgagggctggctcatcttcgtggccgagcaggaggagctctacgtccgcgtgcagaacgggttccggaaggtccagctggaggcccggacaccactcccacgagggacggacaatgaagtggccgccttgcagccccccgtggtgcagctgcacgacagcaacccctacccgcggcgggagcacccccaccccaccgcgcggccctggcgggcagatgacatcctggccagcccccctcgcctgcccgagccccagccctaccccggagccccgcaccacagctcctacgtgcacctgcggccggcgcgacccacaagcccacccgcccacagccaccgcgacttccagccggtgctccacctggttgcgctcaacagccccctgtcaggcggcatgcggggcatccgcggggccgacttccagtgcttccagcaggcgcgggccgtggggctggcgggcaccttccgcgccttcctgtcctcgcgcctgcaggacctgtacagcatcgtgcgccgtgccgaccgcgcagccgtgcccatcgtcaacctcaaggacgagctgctgtttcccagctgggaggctctgttctcaggctctgagggtccgctgaagcccggggcacgcatcttctcctttgacggcaaggacgtcctgaggcaccccacctggccccagaagagcgtgtggcatggctcggaccccaacgggcgcaggctgaccgagagctactgtgagacgtggcggacggaggctccctcggccacgggccaggcctcctcgctgctggggggcaggctcctggggcagagtgccgcgagctgccatcacgcctacatcgtgctctgcattgagaacagcttcatgactgcctccaagtagccaccgcctggatgcggatggccggagaggaccggcggctcggaggaagcccccaccgtgggcagggagcggccggccagcccctggccccaggacctggctgccatactttcctgtatagttcacgtttcatgtaatcctcaagaaataaaaggaagccaaagagtgtatttttttaaaagtttaaaacagaagcctgatgctgacattcacctgccccaactctcccctgacctgtgagcccagctgggtcaggcagggtgcagtatcatgccctgtgcaacctcttggcctgatcagaccacggctcgatttctccaggatttcctgctttgggaagccgtgctcgccccagcaggtgctgacttcatctcccacctagcagcaccgttctgtgcacaaaacccagacctgttagcagacaggccccgtgaggcaatgggagctgaggccacactcagcacaaggccatctgggctcctccagggtgtgtgctcgccctgcggtagatgggagggaggctcaggtccctggggctagggggagccccttctgctcagctctgggccattctccacagcaaccccaggctgaagcaggttcccaagctcagaggcgcactgtgacccccagctccggcctgtcctccaacaccaagcacagcagcctggggctggcctcccaaatgagccatgagatgatacatccaaagcagacagctccaccctggccgagtccaagctgggagattcaagggacccatgagttggggtctggcagcctcccatccagggcccccatctcatgcccctggctgggacgtggctcagccagcacttgtccagctgagcgccaggatggaacacggccacatcaaagaggctgaggctggcacaggacatgcggtagccagcacacagggcagtgagggagggctgtcatctgtgcactgcccatggacaggctggctccagatgcagggcagtcattggctgtctcctaggaaacccatatccttaccctccttgggactgaaggggaaccccggggtgcccacaggccgccctgcgggtgaacaaagcagccacgaggtgcaacaaggtcctctgtcagtcacagccacccctgagatccggcaacatcaacccgagtcattcgttctgtggagggacaagtggactcagggcagcgccaggctgaccacagcacagccaacacgcacctgcctcaggactgcgacgaaaccggtggggctggttctgtaattgtgtgtgatgtgaagccaattcagacaggcaaataaaagtgaccttttacactgaaaaaaaaaaaaaaaaa

SEQ ID NO: 676 - DNA, 3088 bp, Homo sapiens
gtggatcggtgggtttatctcaaggcctgagtagccggtaacaaacgagggttcccgggattggaccgacgcagccatgcctctgcgacttgatatcaaaagaaagctaactgctagatctgatcgagttaagagtgtggatctgcatcctacagagccatggatgttggcaagtctttacaatggcagtgtgtgtgtttggaatcatgaaacacagacactggtgaagacatttgaagtatgtgatcttcctgttcgagctgcaaagtttgttgcaaggaagaattgggttgtgacaggagcggatgacatgcagattagagtgttcaattacaatactctggagagagttcatatgtttgaagcacactcagactacattcgctgtattgctgttcatccaacccagcctttcattctaactagcagtgatgacatgcttattaagctctgggactgggataaaaaatggtcttgctcacaagtgtttgaaggacacacccattatgttatgcagattgtgatcaaccccaaagataacaatcagtttgccagtgcctctttggacaggactatcaaggtgtggcagttgggctcttcgtcaccaaacttcactttggaaggacatgagaaaggcgtgaattgcattgattactacagtggtggggacaagccatacctcatttcaggtgcagatgaccgtcttgttaaaatatgggattatcagaataaaacatgtgtgcagacactggaaggacatgcccaaaatgtgtcttgtgccagctttcatcctgagttgccaatcattatcacaggttcagaagatggaacagtacgtatttggcattcaagcacctaccggcttgagagcacactgaattatggaatggagagggtatggtgcgtggccagtctaagagggtcaaacaatgtcgctttgggctatgatgaagggagcatcattgttaagcttggtcgggaggaacctgccatgtccatggatgccaatggaaagataatttgggccaagcattcagaagtccagcaggccaacctaaaagcaatgggagatgctgaaattaaagatggtgaaagattgccactggcagtaaaggatatgggcagttgtgaaatataccctcagactattcagcacaatcctaatgggcggtttgtggtggtgtgtggtgatggggagtatatcatctacacagcaatggcattgagaaacaagagctttggatctgctcaggagtttgcatgggcccacgattcttcagagtatgcaataagagagagcaacagcattgtaaagatatttaagaactttaaggaaaaaaaatcatttaaaccagattttggagcagaaagtatctacggcggcttcttattgggagtcagatctgtaaatggcttagccttctatgactgggacaatacagaactcatacgaagaattgaaattcagcccaaacatattttctggtctgactctggagagctagtctgtattgctactgaggaatcattttttatccttaagtatctgtcagaaaaagtcttggctgcacaggaaacacatgagggagttactgaagatggcattgaagatgcctttgaggttcttggtgagattcaggaaattgtgaaaacagggctttgggtaggcgattgcttcatttacacaagttctgtgaacagattaaattattatgttggaggagaaatagtcaccattgcccacttggacaggacgatgtatctcctaggctacattcctaaagacaacaggctttatctgggggataaagaattgaacatcattagctattccctgctggtttcagtcctggaataccagacagctgtcatgcggagggactttagcatggctgataaggtccttcctaccattccaaaagaacagaggaccagagttgcacactttttggaaaagcagggcttcaagcagcaagctcttacagtatccacagatcctgagcatcgttttgagcttgctcttcagcttggagagttaaaaattgcataccagttagcagtggaagcagagtcagaacagaagtggaaacaacttgctgaacttgccattagtaaatgtcagtttggcctagcccaggagtgcctgcatcatgcacaggattatgggggcctgctgcttttggccactgcctctggaaatgctaatatggtgaacaagctagcagagggtgcggagagagatggcaaaaataatgtggcattcatgagctactttttacagggcaaggttgatgcctgcctagagctcttaattagaactggacggctgccagaagctgccttcttggcccgaacttacttacccagtcaggtttcaagggtagtgaaactctggagagagaatctctcaaaagtcaatcagaaagcagcagaatcccttgctgacccaacagagtatgaaaacctgttccctggattaaaagaagcctttgttgttgaagaatgggtgaaggaaacacatgctgatctgtggccagccaaacaatacccacttgtcacgccaaatgaagagagaaatgtcatggaagagggaaaagactttcagccctcaagatctacagctcaacaggaacttgatgggaaacctgcttctcctactccggttattgtggcctcccacacagccaacaaagaagaaaagagtttactcgaactagaagtagatttggataatttggaattagaagatattgacacaacagatatcaatctggatgaagatattttggatgattgactgtaatgctttccatttacctgactaaacagatcattattatatataggtattgattgctaccctgaccacagtgctttggactatgagaaacttcttagatttttatatgtaaatgctgtggaccactgggagcacaatgcccacatcatcttaagaagagtttatgtgcagcatttaaatcactgtgttttccttgttaactaaaacagacatgggctttgatttttttcatactattagaccatatctcataaaaccttttgaattaaaaaaaaaaaaaaaaaaaaa

SEQ ID NO: 677 - DNA, 2583 bp, Homo sapiens
gaagatcctttctgagctgctgtgaataaatttggaatggtactgtatatttccatctaatggagaactagctgtactttgaataaggattgctgcactggacgactttagaacatccctcacaatgtcgtcaacccggagccagaacccccacggcctgaagcagattggcctggaccagatctgggacgacctcagagccggcatccagcaggtgtacacacggcagagcatggccaagtccagatatatggagctctacactcatgtttataactactgtactagtgttcaccagtcaaaccaagcacgaggagctggagttcctccttctaagtcgaaaaaggggcagacacctggaggagctcagtttgttggcctggaattatataaacgacttaaggaatttttgaagaattacttgacaaatcttcttaaggatggagaagatttgatggatgagagtgtactgaaattctacactcaacaatgggaagattatcgattttcaagcaaagtgctgaatggaatttgtgcctacctcaatagacattgggttcgccgtgaatgtgacgaaggacgaaaaggaatatatgaaatctattcgcttgcattggtgacttggagagactgtctgttcaggccactgaataaacaggtaacaaatgctgttttaaagctgattgaaaaggaaaggaatggtgaaaccatcaatacaagattgattagtggagttgtacagtcttacgtggaattggggctgaatgaagatgatgcatttgcaaagggccctacgttaacagtgtataaagaatcctttgaatctcaatttttggctgacacagagagattttataccagagagagtactgaattcttgcagcagaacccagttactgaatatatgaaaaaggcagaggctcgtctgcttgaggaacaacgaagagttcaggtttaccttcatgaaagcacacaagatgaattagcaaggaaatgtgaacaagtcctcattgaaaaacacttggaaattttccacacagaatttcagaatttattggatgctgacaaaaatgaagatttgggacgcatgtataatcttgtatctagaatccaggatggcctaggagaattgaaaaaactgttggagacacacattcataatcagggtcttgcagccattgaaaagtgtggagaagctgctttaaatgaccccaaaatgtatgtacagacagtgcttgatgttcataaaaaatacaatgccctggtaatgtctgcattcaacaatgacgctggctttgtggctgctcttgataaggcttgtggtcgcttcataaacaacaacgcggttaccaagatggcccaatcatccagtaaatcccctgagttgctggctcgatactgtgactccttgttgaagaaaagttccaagaacccagaggaggcagaactagaagacacactcaatcaagtgatggttgtcttcaagtacatagaagacaaagacgtatttcagaagttctatgcgaagatgctcgccaagaggctcgtccaccagaacagtgcaagtgacgatgccgaagccagcatgatctccaagttaaagcaagcttgcgggttcgagtacacctctaaacttcagcgcatgtttcaagacattggcgtgagcaaagatctgaacgagcaattcaaaaagcacttgacaaactcagaacccctagacttggatttcagcattcaagtgctgagctccgggtcctggcccttccagcagtcttgtacatttgccttgccgtcagagttggaacgtagttatcagcgattcacagctttctacgccagccgccacagtggccgaaaattgacgtggttatatcagttgtctaaaggagaattggtaactaactgcttcaaaaacagatatactttgcaggcgtcgacattccagatggctatcctgcttcagtacaacacggaagatgcctacactgtgcagcagctgaccgacagcactcaaattaaaatggacattttggcgcaagttttacagattttattaaagtcgaagctattggtcttggaagatgaaaatgcaaatgttgatgaggtggaattgaagccagataccttaataaaattatatcttggttataaaaataagaaattaagggttaacatcaatgtgccaatgaaaaccgaacagaagcaggaacaagaaaccacacacaaaaacatcgaggaagaccgcaaactactgattcaggcggccatcgtgagaatcatgaagatgaggaaggttctgaaacaccagcagttacttggcgaggtcctcactcagctgtcctccaggttcaaacctcgagtccctgtgatcaagaaatgcattgacattctaattgagaaagaatatttggagcgagtggatggtgaaaaggacacctacagttacttggcttaacccttctggaagggtctgactgtgtgacccgcagcaaatagttcatgttggaaagaatgaaaacaacttcaagttcataggcagccagcctgccgccattggacctcccttttaaaaactgaggacca

SEQ ID NO: 678 - DNA, 4599 bp, Homo sapiens
ccctgtgtctaggtcgtttgggaaacgccttggagagtcaagaataaatttgcaggtcaaacaatggatgactggaaaagtcggcttgtaatcaagagcatgcttccccatttcgccatggtgggaaatcgtcaggagcccagaaagctccaggaatcgggaaagaagccctcgtggatggaggaagaagatttatcttttctctacaagagcagcccaggaagaaagcatcaggggaactgttaacaggagacaagaagaagaccacttccagtttccagacatggctgatgggggctaccctaataaaattaagaggccttgccttgaagatgtcacccttgcaatgggcccaggtgctcatcctagtactgcttgtgcagaactgcaggtccctccattgacaataaatcctagccctgcggctatgggagtggctggccagtcattactgctggagaataaccctatgaatggcaacatcatgggctcaccatttgtagtaccacagactacagaagtgggactgaaagggcccactgttccttactatgagaaaatcaacagcgtgccggctgtagaccaggagcttcaagagctgctagaggagctcaccaaaattcaagacccttctccaaatgagctagatcttgagaagatactggggacgaagccagaagagccactggttttagatcatccccaggcaaccctaagcacaactcccaagccttcggttcagatgtcacacttggagagcctggcttccagcaaggagtttgcttctagttgcagccaagttactggcatgtcacttcagatcccatcctcctccacagggatcagctattcgattccttccaccagtaagcagatagtgtcaccgagttcttcaatggcacagtccaagagccaggtccaggccatgctccctgtcgctctgccccccttaccagtgcctcagtggcatcacgcccaccagctgaaggcgttggcagccagcaagcaggggtctgctacaaagcagcaagggcccacccccagttggtctggtctgcctcctccaggactctctccaccttcccgcccagtgccatcactacagccaccaccgctgccactgccaccaccaccacccccattcagcccccagagcctcatggtgtcctgcatgtcgtccaataccttgtcgggtagcactctccgaggctctcccaatgccttactgtcaagcatgacgtccagcagcaatgctgccctggggcccgccatgccctatgctcctgagaagctccccagccctgctctcactcaacagccgcagttcggccctcagagctccattcttgccaacctcatgtcctctaccatcaaaacccctcaaggacacctgatgtctgctctgcctgccagcaaccctgggccgtccccaccctatcgcccagagaagctctctagcccaggcttgccacagcagtccttcaccccacagtgttccctgatccgaagcctcactcccaccagtaatcttctaagccagcaacagcagcagcagcagcagcagcagcaagcaaatgtgatctttaagcccataagcagcaactcatccaaaaccctgagcatgatcatgcagcaggggatggcaagctccagcccaggagccacggagccatttacttttggcaacaccaagcccttgtcccattttgtttctgagccgggtccccagaagatgccctccatgcctaccacctctaggcagccttccctgctccactacctgcagcagccgacaccaacgcaggcctcctcagccactgcctcctccacggccactgccaccttgcagctgcagcagcagcagcagcaacagcagcagcagcctgaccattcttcattccttctgcagcagatgatgcagcaaccccagcgttttcagcgatcagtggcctcagattccatgcctgctctgcccagacaggtctgttgccatctgtttgcatggacttctgcagctagctcggtgaagccccagcatcaacacgggaactctttcactagcaggcaagatcctcagcctggagacgtgtcaccgtctaacattactcatgtagacaaagcctgcaagcttggggaagccaggcacccccaggtcagcctcgggcgacagcccccgtcctgccaggccctggggagtgagtccttcctgcccggcagctcctttgctcatgagctggcccgagtcacctcctcgtacagcacctcagaggcagcgccctggggcagctgggatccgaaggcctggaggcaggtgcccgctccactactgcctagctgcgacgccacagcaagaggaacagagatcaggtcttatggcaatgacccctgaacggcagaatgcatatatctcccaacagatgagtccatttgaagccgtccaagaacaagtcacctccaagtgtagccggatcaaggcaagccccccatctagcaagcacttgatgccacccagaactgggcttcttcagaacaatctgagtccaggaatgatcccactcaccaggcaccagagctgcgagggcatgggagtgatctcaccaactctggggaagcggcaaggaattttcacctccagcccccagtgtcccatcctctcacactcaggccagactcccctgggcagacttgactctgtctgccagcatatgcagagccccaaggccaccccaccagaagtgcccctgcctgggttctgtcccagctccctgggcacccagtccttgagtccccaccagctcagacggcctagtgtgccaagaatgcccactgcgttcaacaatgctgcatgggtcacagcggcagcagctgtgaccacagcagtttcggggaaaacacccctcagccaagtggataatagcgttcagcagcactcaccttctggccaggcctgccttcagaggccatctgattgggaggcacaagtgcccgctgcgatgggaacacaagtgcccctggccaacaaccccagcttcagcctgctgggcagccagagcctcaggcagagcccggtacagggcccggtgcctgtagcaaacaccaccaagttcctccagcagggtatggccagctttagtcccctgagccccatacagggcatcgagccaccaagctatgtggctgctgctgccaccgctgctgctgcttctgccgttgctgccagccagttcccaggtccgttcgacagaacggatattccccctgagctgccacctgccgactttttgcgccagccccaacccccactaaatgatctgatttcgtcacctgactgcaatgaggtagatttcattgaagctctcttgaaaggctcctgtgtgagcccagatgaagactgggtgtgcaacttgaggctgatcgacgacattttggaacagcatgctgctgctcaaaatgccacagcccagaattctgggcaagtcacccaggatgctggggcactttaaatctgagcaggatgcccatagaaacccccatggtgacatcactctaggaagtggtgtcgatccatacccgcagttgtctcccgttacaatttgagtggtgttgtcagcccatgcttatccctctctctacctgtgacaaaatggaaagctggtgatttttcaagctacgtgtacatatttgaaaattttgtaaatggttttcctaaacattaatgacagaagtatttatacttcattttgtgactttgtaaataaagcgacggcttttgtttcagtagagttgtgtttactatgcattgttttgtgtttattatacaatgttacaaatatgcagaccgtgttgtttgctccagtgataccttgttaagctaggtggctgagtcgcttatggttttaatgcaatgagcaatgtggatatgaccaagagttgttgtgcaagttgacaaatgccaaatagaaaaccacttggccatttatttctatgttcactaaaaatcctattgccttgtgtgattcttaatctcttttgcgaacctttcagtctccgctagctctttcctaatgagctttacagcagaagctgttttatcgttaagtgccccacagagacactttaccaggaggctgggagagttctccagatttgggagaggcgcagagacagtgtgtgagccgagccctgtctcagcaatccacctggaggagctagagtatcctcctccctttaccattcagaccgagagaaaaagcccagcttgtgtgcaccctcgtggggttaaggcgagctgttcctggtttaaagcctttcagtatttgttttgatgtaaggctctgtggtttgggggggaacatctgtaaacattattagttgatttggggtttgtctttgatggtttctatctgcaattatcgtcatgtatatttaagtgtctgttatagaaaacccacacccactgtcctgtaaacttttctcagtgtccagactttctgtaatcacattttaattgccacctcgtatttcacctctacatttgaaatctggcgtctgtttcaagccagtgtgttttttcttcgttctgtaataaacagccaggag

SEQ ID NO: 679 - DNA, 796 bp, Homo sapiens
  misc_feature (687)..(687): n is a, c, g, or t
tttttttttttttaagatagaaatctatgcactttaatgattgccagaattgcccagcatagcttcagtaaaatagagaattgtctagaaaatacaatctccaaaatgtgtgcaagtactgcaaaccggacagaccggggcagggcaaggcccttgaaaccaagtcctccttgagcacctttcccaggttagaaacccctcttcagcctgtgcttcgcacgtttccttcagcgtgccgccattcagactgcgccacttacgtcccagtgccacgctgcgtggatcaagtttcaacgggaaagtatgagttaggcaagcgctttttttttaagctgtaaacgcttcacatgactggccccgtaagaaattgtgggagcttagatgagcctggagcttttcaggaactggatgaggactctgtacacaaatgtgtactggcagagagtctgcaccagcatattctctgttgctcagcatgtccagcactctcgggatgtccagcacctcattgtgttccaggcaggcgatcatgatctccgacaaaatcaccacgccagtccttcctaccccagcactgcagtggaccaacaacggagggttggggctttggggatcacttgtgctatttgtatggcgtcgaacagactgaatctcttcaagatatgattaaaaatccttgaggtcttntggaccagccttgtttaagcccagtctgtgtattgaaggtgccagaacgtccttttctgcccaggtgggaagtgcttcattctttcaggcttgtggtgccataacagcc

SEQ ID NO: 680 - DNA, 1815 bp, Homo sapiens
cggcgccgccagccagcctcggcggggagagtgcagtttattctgggcctgtgtggaatagaaagacaattctttatttgactggtaggaaagaaaagagaagactcctcagggtttccaaggaggactggagcggctgctttagtgaagaagtgaagaatcaaggaagtaaaggacctgtctcaaagtcacacaactaggaaatcttgaggagtttgatacttttcatcctccagctataaaatcatcttgtagggggaagctgtacattggtggaaaataaaaggcaagcagttcctggcccgtgatattccagttagaggtgtctgactgacagcatgttggcaccgagggaagcgatgggcttcggctccaggtttctgtcctgagaccacagcagaatgtgccttggacaaaggcttggactccttgatcttctggtaacttcaaaaatctggtctcagggtggtgaactttttcttcgaattcctaacctgtgagcttacgaaaaagggagcatgcctgtcttattctcagtgcctcatgggaaataaaagattgggagatgatagctacctgatgatggtgcctgtccattaactgaacaactgtggttttgaacttcttgaggccagggactgtgtctgaaaacaccgacggtggctaactcaagggagacgtctggtgaacacccgtgggatctaaagaacaagctctgaaagtgttccagctgaaatttcagatcggacagactcgctgcggctccggaggcagtgattccaagctgctcgcgcacgctgctgccaagctgcaggatggtgcacgtagccaggctgctgctgctgctcctcactttcttcctccgcacggatgctgagacacctccaaggtttacacgaacacccgttgatcagacaggggtctctggcggagttgcctctttcatctgccaagctacgggagacccaagacctaaaattgtctggaacaaaaaaggaaagaaagtcagcaatcagagatttgaggtaatagagtttgacgatgggtctggatcagttctcagaatacaacccttacggactccgagggatgaggccatttatgaatgtgtggcctcaaataatgtgggagaaataagtgtatccaccagactcacagttttgcgggaagatcaaattcccaggggcttccctaccattgacatgggcccacagttgaaggtggttgagcgtactcgcacggccaccatgctttgtgcagccagtggtaatccggatccagaaatcacttggtttaaagatttcttacctgtggacacaagcaacaacaatggtcgtattaagcagttacgatcaggtactgatttttctccctcttctctttctctgttacttaatgggtggtccatgtttgtgatgtcatagcctgtttcagagtctgtctttctccttttctctgtgtgttttgcagcttctgtttaatccacattgctcactgctgtgactgtatttttggtaattttttaatttactgctttttcgcagtatttgatggatccattttctcctctttctttcttctttctctgttttcttttgaaacaaatttatttcaacattggacttcattcagaacttgcaaggagatccaatggttgtatccattaaaaaataaaatgttcatattaaaccctaaaaaaaaaaaaaaaaaaaaaaaaaaaaaaaaaaaaaaaaaaaaaaaaaaaaaaaaaaaaaaaaaaaaaaaaaaaaaaaaaaaaaaaaaaaaaaaaaaaaaaaaaaaaaaaaggggggggcc

SEQ ID NO: 681 - DNA, 400 bp, Homo sapiens
gcgagctgagccctggccgccgccacaatgggccgcgagtttgggaatctgacgcggatgcggcatgtgatcagctacagcttgtcaccgttcgagcagcgcgcctatccgcacgtcttcactaaaggaatccccaatgttctgcgccgcattcgggagtctttctttcgcgtggtgccgcagtttgtagtgttttatcttatctacacatgggggactgaagagttcgagagatccaagaggaagaatccagctgcctatgaaaatgacaaatgagcaacgcatccggatgacggttccctgtctctgaaagacctttctctggaagaggagtctgcattgtagtgtctcaaagacacaataaacttcctatggtctgcaaaaaaaaaaaaaaaaaaaa

SEQ ID NO: 682 - DNA, 358 bp, Homo sapiens
cagagtctctgatcaagcagattccacgaatcctcggcccaggtttaaataaggcaggaaagttcccttccctgctcacacacaacgaaaacatggtggccaaagtggatgaggtgaagtccacaatcaagttccaaatgaagaaggtgttatgtctggctgtagctgttggtcacgtgaagatgacagacgatgagcttgtgtataacattcacctggctgtcaacttcttggtgtcattgctcaagaaaaactggcagaatgtccgggccttatatatcaagagcaccatgggcaagccccagcgcctatattaaggcacatttgaataaattctattaccagttcaaaaaaaaaa

SEQ ID NO: 683 - DNA, 460 bp, Homo sapiens
  misc_feature (186)..(186): n is a, c, g, or t
ctgctcatgatggctggtatcgatgactgctacacctcagcccggggctgcactgccaccctgggcaacttcggtaggtggtccacacatggggcatagccatggtctctcagctccgcttaaccacacgggtccagtgtgtgcttggcgtgttttcagggaggcagagaaaggctctcctaatgnacgacagacccgcccagaatggcctctctgttcctaggagtgcgacaatttttgggttgggggacttgcctcaagcacaccactgaccctcctggggttcttttgttttgcagccaaggccacctttgatgccatttctaagacctacagctacctgacccccgacctctggaaggagactgtattcaccaagtctccctatcaggagttcactgaccacctcgtcaagacccacaccagagtctccgtgcagcggactcaggctccagctgtg

SEQ ID NO: 684 - DNA, 1478 bp, Homo sapiens
ctgagaaggcggtggctgcagcagcagcggcggcggaaaccctaaagtccgagtccggactacgagtgcgtggcctcctaatccggatcctagtcctgagcgtgtctgtgtgcgagtggacggtcccggacgcgatgaccctgaacggcggcggcagcggagcgggcgggagccgcggtgggggccaggagcgcgagcgccgtcggggcagcacaccctggggccccgccccgccgctgcaccgccgcagcatgccggtggacgagcgcgacctgcaggcggcgctgaccccgggtgccctgacggcggccgcggccgggacggggacccagggtcccaggctggactggcccgaggactccgaggactcgctcagctcagggggcagcgactcagacgagagcgtttacaaggtgctgctgctgggggcgcccggcgtgggcaagagcgccctggcgcgcatcttcggcggtgtggaggacgggcctgaagcagaggcagcagggcacacctatgatcgctccattgtagtggacggagaagaggcatcactcatggtctacgacatttgggagcaggacgggggccgctggttgcccggccactgcatggccatgggggatgcctatgtcattgtgtactcagtgacggacaagggcagcttcgagaaggcctcagaactgcgggtccagctgcggcgtgcacggcaaacagatgatgtgcccatcatcctcgtgggcaacaagagcgacctggtgcgctctcgtgaggtctcggtggatgagggccgggcctgcgcggtggtctttgactgcaagttcattgagacatcagcggcattgcaccacaatgtccaggcgctgtttgaaggtgtcgtgcgccagatacgcctgcgcagggacagcaaagaagccaacgcacgacggcaagcaggcacccggaggcgagagagccttggcaaaaaggcgaagcgcttcttgggccgcatcgtagctcgtaacagccgcaagatggcctttcgcgccaaatccaagtcctgccacgacctctcggttctctaggtcccacccgctcccactatggtgggagacgaacggaagggttggtgggctggcccagccaactgccccgggtgcctcagagcaggctcagactctgggtccctcggagctgccagccgggcacccccaacctcatggtcatggacagatagacagtgctgccctgcgaagtggctctcaggggccagtgagggctgggcccacagagatgcatgcgcaggctcatatgcgtcccaagcagccgcagcgcagccgccgggcaggcctgcgtgccgggagaggactctgcctttttttcacagcccgggtgtgcctgccctggagggaggctcttcagtgcggtagctatttgtttacatgcagatttttgtaataaaggctatttcctgataaaaaaaaaaaaaaaaaaaaaaaaaa

SEQ ID NO: 685 - DNA, 5896 bp, Homo sapiens
gcaggcagctgctgtcctatgctttgatacatccagccacttcgttagaagaccgtagtgctttagccatgtggctgaatcacttggaggaccgcacgtcgaccagctttggtggccagaaccgaggccgctcagactctgtggattatggacagacacactactatcaccaaagacagaactctgatgacaagctcaatgggtggcagaactctcgggattctgggatttgcatcaatgcctccaactggcaggacaaaagcatggggtgtgagaatggccatgtgcccctctactcctcctcatctgtccccaccacaatcaatacgattggaaccagcacaagtacaaatgttccagcctggctgaaaagcctccgcctgcacaaatatgccgcgcttttctcccagatgacctatgaggagatgatggccctcaccgagtgccagctggaggcgcagaatgttaccaaaggtgcaagacacaaaattgtcatcagtattcagaagctcaaagaaagacaaaatctcctgaagtctttggaaagggacatcatcgaggggggcagcctgcgcatcccgctccaggaactgcaccagatgatcctgactccgatcaaggcctacagctccccgagcaccacccccgaggctcgccgccgggagccccaggccccgcgtcagccctcactgatgggccccgagagccagagccccgactgcaaagatggggccgcagccactggcgccacggccaccccctcggccggggccagcggggggctccagccgcaccagctgagcagctgcgatggggagctggccgtcgcccccctgccagagggggacctccccgggcagttcacacgcgtcatggggaaagtgtgcacacagctcttggtctccagacctgatgaggaaaatataagttcctatttacagctcatagacaagtgtctaattcatgaggcatttacagagacacagaaaaaaagattgttgtcatggaaacagcaggtgcagaagctctttcggtctttccctcggaaaacccttctagacatatcaggatatcgacagcaaagaaatcgaggctttgggcaatccaactccctcccgacggctggctctgtgggcggtggcatgggcagacggaacccgcgccagtaccagatcccctctcggaacgtcccttccgcccgcctgggcctcttgggcaccagtggattcgtcagctccaaccagcgcaacaccacagctacccccaccatcatgaaacaaggaagacagaacctgtggtttgccaaccccgggggcagcaatagcatgccaagccgcacccacagctcagtccagaggacccgctcgctgcccgtgcacacttccccacagaacatgctgatgttccagcagccagaattccagcttcccgtgaccgaacctgacatcaacaacaggctggagtcgttgtgcctcagtatgaccgaacacgccctgggagacggggttgaccggacctccaccatctagaagctgaagacgagagtgaccgcgctggccgtgaaatcgactgctgcgggtccagtgtccgccatcttcagggttgcacagaatcctccaagatactttgcagccttttttccccctggtccctctcccgttttgattttgtgagagcgtaggtcatcctcgtaaacatatcagtagacctggggttggttattttgtcatttgtttctgtcatgggatggtttggtgtgtggggtggggaggggtctctagggaattatgagactgggaggggggtggagggaatgcaggtagctctctggatggaacggggacaggggaaagagtactgccatgaaagagataggagacacataagaggacagcagaagccctggccctggggaggcttctcggaaggcctggcttcacaggcaggccacagaaggatatcgcgggcacgtgcacccaaagcaagatagtggcttcccttttatatccaatctaatcctgattggatgtccctgaggcccctgctggaaacagccataggagagggcccatggcagtaggggaaagaaggaagaaattccctgcaacaaaacttcagctaaactttgatttgtgtattgtttacataataattttaaagggtacataatgtgtaaagagtttggatagaacctctcttcatactatggttttcgtaaaggatctgttgttgttacggattcattttttccctctatttttataagagcagcagagttgtcttctcaaaacggctgccaagctctgcttcttgggaagatggatgcagtcatgtaggcctgagctgtccgtctttcaccgttaggtgggaggagcgtatgggtggacttgaaggacatggacgtggctggaatgagcacagcattgggtgagcgcacaaggatgaggacatcatgtgatcagttatgggtttgctcgcagggcacccagagattctcaaagaatcctgcagcctctttctgtgctggatttgcttgtcacggagaggcctccctccctttccaccccacccatggggcattatcctgtcactcccagccttgctccacacacacacaggtgggtacaagttccactggaggagaaaaggcaaggatggactttttccccttgtgagaggtttgatacccagaaaatgagctcaaaacctttacattagggttgcttgtaggaactggagcctggaggctgcatctacttcacctgtcactgctgagggagaggaggggagaaaggcccagcaacagcgtacagaggggtcagtcagcaagtccagagagcacatgcagggagatgtttggcccacaccgcacagccccgccatctccagtgggcgatgaaagatgtaggaaaggttgatttcaagatggaaatgacagcgctatccgcacagtatgaattagggatttgctgtgttagttgatttatccatccacacagaggggaggaaaaagacactcgttacttggtgggagattgagaaactgtggtacctaccacaaagtaatagctctgtttatgaagggcaagaaaggctacatttcagaatttgacacagtggagggtattagaggaaatcaaagaggagttgtgtggaaaatcaggttgtgtaaatgaaggtatgaatgctcagccagaggcaagatcagggagatggtacaaggcctgtttgttacatggatgagtcgggtgcctggttgtgtgtgtgtgtgtgtgtgtgtgtgtgtgtgtgtgaagtcagagttgaaattcagaagatcagactatggaaatcactgcccttttttttttaaaagctaatgaactacatacagacctaaaaggccttaatgaaatccgaacaattttcttttactttcaagatcaaaaacatgcacccaacccagccttggatgccaccaccaggtttttgaagcccttttgagtctaagaaggtgagaacaatgtaaccatagaaagcctttcgtgagcagagaaggcttgaatccacaatttcattcgctgaattaaaaaaaaaaggttcagacctctccttgggtgactaagttctaaagatgcaaatccatgtgcagaaagagatggcattttttagttgattatttttaaccaagtgccattaacattcatcccccacatcccttttctaaacaagcttagtgttacttggggaatgtgttgggatggacgatcacatgtaaggcaggaagaataggtcaaaggttgaaggccaaaggtaagaccagagggtttgcgaatgtgggtttgtaggatactgagaaagtgaataaagaggagaaaaaaccatggtattacacatcttgctgagaaaggaaagcattcggatctgctgcaaaaacacatatatccataaagactcatgttattcagaaaacagattgtgaacacaatcacattcgcatgaatcctttaaaaggaagaagaccttaaagtatctgcaaatctgaatttctatttattccttcactgaatatagaaacaatggttatctgattattagagatattattttggatatgttacttattaacttgctatggctggtaaccatgataaagtctgttattaataacaacataattctttttttaaaaaagaaaagcttatttttcattgacagtgtatagatttatctacttagttgtgttttgctattagtgttttaattttttttttaagttgagtgtttgataaattttaagaccctgtccccaccttgttttgagtcctgtgttgactacaggtatatagctcaatttaaaaatcctaaagcaaaagaattttatttataaaagaatcaaacagttgcatgcatgaggctgtgaagtcagatatttagtaataaaagcagcagtgcctttttttgtatttacccattgacccccaccaaatgcaactgttttatattaagaaaatagtaacaattttaaaatctcagagtaaaatctatttcactacatgcttttccccccttgttctgatttaagcagtgtgtacttggcatctctacattgtcctagggacagtggtgttctacaatattatcatgtatgatgttttattggtgctttttattcatagtggcttcttaccagaaacagtaggaagaaacacatgaactgtgtacaagacatgaaacattgctgctgatatgttgttttttcacatgcttttgagttttcactttttaaacgagagccagcaagcaaaatagatgtggctgggtctgcctgtccgggcggctctttgcaccgagctctcaaatcctgtgtattgagggttcctttttggtactcaggattggagctacagctgggcccccctctctcccattcgtttgaagagacactgagggaaacaagggtttcttttgaggtgtccttggctgccttttacgggatgggagccttctccggatcttttgttcttctgcacctcttgtagctactgccggtgcaaggttgtagatgttattccccaggagcctgggcttgggggctgagctgggctgaatgcaaaagcatgcaaccagaaggcgggcaaggggaggaaaagcaggcctggcctcattggtcccctggagatgtctgtagcagtcagctccagcttgggcctggggaagcagcctgaccaaggcgctcaggtgtgcctgttacaagaagaacctgcagaaggataatttgcacatggagctgtgataacactaatgttgattttttttttttttacaagtcatcagagatgtttgcaaagtgagttttatttttttgtaattcctttatctttacttaaaggtgaatgtgtattcctctgggaggaataggaagaaaacaggaatgttaataatgtcgaacagaaaacttcctcccttattaatatataatcctcatgtatttatgcctaatgtaagctgacttttaaaaagctttcttttgttgcatgccctgtgcaggcatctgtattgtacatgcatgcctttcgtcctgttttcctgtataaagttagtgaacaaagaaatatttttgcctagttcatgttgccaagcaatgcatattttttaaatttgtcatatatggaaagagcatgtttgttacatgtaaaagctttactgatatacagatatactaatgtttgaagatgctgttctttgcaagtgtacagttttcaaatgttgttaccagtgaaacacccttgtggtttaaacttgctacaatgtatttattattcatttcctcccatgtaactaagaatcatggctatatttcatatcaacgttatattgaaagtgaagggaaatgattaatacaaggttttgtaac

SEQ ID NO: 686 - DNA, 1753 bp, Homo sapiens
agcgcgaccagcgagggtaccgggatgaccgctctccggcccgggaaccgggggacgtaagcgccaggacccgcagcggcggcggcgggggcaggagcgccaccaccgccatgccgcccccggtgcccaacggcaacctccaccagcacgacccccaggacctcaggcacaatggcaacgtggtggtggctggccggccgagctgttcccggggcccccgccgggcgatccaaaagccccagccggctgggggccggcgcagtggccgcggcccggcggctggggggctctgccttcagcccccagacggcgggacgtgcgtccccgaagagcccccggtgccacctatggattgggaggcgctggagaagcatctggccgggctgcagttccgggagcaggaggtacggaaccagggccaggcgaggaccaactccacctccgcacagaaaaatgagagagagtctatcagacagaagttggcacttggaagcttctttgatgatggcccaggaatttataccagctgtagcaaaagtgggaagccaagcctttcctcccgactgcagagtgggatgaacttgcagatatgctttgtcaacgacagtggcagtgataaggacagtgatgctgatgacagtaagactgaaaccagcttggacacccccttgtctcccatgagcaaacagagttcttcctattctgatagagacactactgaagaggagtctgaatccttggatgacatggacttccttacaaggcaaaagaaattgcaagctgaagccaaaatggcccttgccatggccaaaccaatggccaaaatgcaagtagaagtggagaaacagaacaggaaaaagtctcccgtcgctgatcttctgccacacatgcctcatataagtgaatgcttgatgaaaagaagtttaaaacccaccgacctgagagacatgactattgggcagctacaagtgatagtcaatgatctccattcccagatagaaagcttgaatgaagagttggtccagctgcttctcatccgagatgagctgcacacagagcaggatgccatgctggtggacattgaagacttgaccagacatgctgaaagtcagcagaagcacatggcagagaaaatgcctgcaaagtgaaaagaagccattcaaccagagaacaagctagaatttattttgcttctgtggttgtaaaaatgctgttgctaaaggtggcgcagaaacaaatatcagtgttagtcattgataatgtctgaagcttaatgtccagtgattggcctttgcttcttaatttattttaattttttacttgtgccacttaatatcaggcattttaataaaatattgttacaaaaaatgtacagtactgacaccaccacaaatcatggttaataaaagagagtagttttaactttatttttatttgtttagagattttaagttggaacagtattttcccattgactacttttcattcttcactgtagttttaaagaagaactgtaaatgacggtgctatacaagtcaaaaaatacatgcctgcctcgtagtgaagttgtagctctccgtaatatgtatattttactcagttttcaacattttgtgaatgttgactacctgaagttcctttttagatgtgctattaacattctgttggattcagagggttccttgaaagttttatgtataaatatgtaaaataaaaattaaaactttgtttcataaaaaaaaaaaaaaaaaaa

SEQ ID NO: 687 - DNA, 751 bp, Homo sapiens
ctgtcaagaagacccacacgcccccctccagcagctgaattcctgcagctcagcagccgccgccagagcaggacgaaccgccaatcgcaaggcacctctgagaacttcaggtaggagaaaagcaaactccctccaacctcttacttcgggcttaaggcagagaactcgcctccccagaatctcctccctccatgatcccccgctattcctctattttcttttcctcggacctgcagccttgggtcgaccctgccctaggggtgactgcaggagagcagggaggatggtcaggcgtcaccaacaaccccatcacccagtaacaagaaccttgactctctcagtccctctgcatcaagacacttacccatttcccacctcatgcctgctaacttgaatgaaacaatcgctgggaaagcattaagagaattaaggctgggcactgtggctcatgcctgtaatcccagcactttgtgaggctgaggcaggcagataacttgagcccaggagtttgagaccagcctgggcaacatggcaaaaccctgctctcccaaaaaaatacaaaaattagctgggcgtgctggtgtgcctgtattcccagctacttgggaggctgaggtgggaggattgcttcagctggggaggcggaggctgcagggagccaagactgagccattgcacccagcctgggtgacagagcaagaccctgtctctaaaaatgaataaaaaaaaaaaaaaaaaaaaaaaaaaaaaa

SEQ ID NO: 688 - DNA, 2042 bp, Homo sapiens
atcatattgttttattattgtggttttttgtttttgagacggagtctcatgctgttgcccaggctggagtacagtggtgcgatctcagctcactacacctccgcctcctgggttcaagcaattctcctgcctcagcctcctgagaagctgggattataggcgtctgccaccacgctcggctaatttttgtacttttagtagagacgggggtttcaccgtgttggtcaggttggtctcgaactcctgacctcaggtgatccccccgccttggcctcccagtgccttggcactggcctattgtgttttatatactatgtttgtcatctggaaaggcaagctcctgctccgtcttgtaaagttttcccagtactgtagtagttatttttatttttatttttgacagtctcgctctgtcacccaggctgaagtgcagtggccccatctcggctcactgcaacctccgcctcccgggttcaagcgattctcttgcctcatcctcctgggaagctgggattgcaggagtgcaccactacacccaactaatttttgtatttttcgtagagacggggtttcgccatgttggtcaggctggtctcgaccttctgaccttgtgattcacccgcctcggcctgtcaaagtgctgggattacaggcgtgagccaccgcgcccggccgtagttattgttttatacgattttaagatcatttaattaaatcttctgaactccgtggagattccaatagaagtatttgtaatttttgaactgacaaccttctgttacctttcatctaatatgttgttgcatcagttcaaatactgttttaaatccttcgataagtcgtctctattcgtagctttttgggtcactttttttttttttttccaaaaaaacaggaagtctttttacctgcagcgtcaactgagccggttttccggcgcgcgccagcccctcccctgctcccgccccaaggttctgcgttaccatgggaacaaaggttgacgtcacttagggcttccttgctggacccaagggtcgatggtgaagggagacgggtggagaggcggttttgctccatctacgcatgcgcacttcctgctccaggactcccccgccgtaaatctcgttccggctgggccttttccgccgcgactctcgcttaatcccggagaaactgccccctgggggaggggagtagaaaaaggctggaaccagcgacagccaatcccgcgacactacaacgcaggcgagattgattgagtccaccaccgcagccaatgagagagctcgccgtcgctccgtcatagagttcgccccaccccatcccctcctttctggactccgagctcagttcacgcagtaacaaatgaagtgcgcgctgcgacacctcccagcccaccgaactccgccgccatttcctcgcttggcctaacggttcggccaatcccagcgcgcatcaagaaggactgaggctccgccaatcggaggccgccaatttcgacccttcgcctcggcccggcccaatccaggccccggccccgccgcccccggcccgcccccgcggtgccctctctcctccctctttgtgcgtctcgcgccgccgccgcccgccgcgtgagaggacgggctccgcgcgctccggcagcgcattcgggtcccctccccccgggaggcttgcgaaggagaagccgccgcagaggaaaagcaggtgccggtgcctgtccccgggggcgccatggcgaccggagcgaacgccacgccgttgggtaagctgggcccccccgggctgcccccgctccccgggcccaaaggaggcttcgagccgggccctccgcctgcacccgggcctggggcggggctgctggctcccgggccgccgccgcccccgcccgtgggctcgatgggggccctgaccgcggccttccccttcgcggcgctgcctccgccgcctccgccgccgccccctccgcctccccagcagccgccgccgcctccaccgccaccgtcccccggcgcctcgtacccgccgccgcagccgccccc

SEQ ID NO: 689 - DNA, 2084 bp, Homo sapiens
atgcaattaggacgaggtgagcgcagacgtcactctaagctcagacatttcgcagtctcctcccctgagggaaaaccaaatacctccagcccaaatcagggttgtgaggccaaatctgcaagaaggctgcaggcgagagggaaggctccctctgcgcctgaaagcccccaagtcctcgggttggggggaactcttcagcacatccttctctggacaacagaagaagaatcactgtccacaaaatatattaaaactgaaatttttgttcttttagctttcgaatttacacttttgagagcagtgtgattctttcaagtctagcagtgcattaagagggcctgggcgtttccgttccgccctcctcgctaagacaactagcagcggcacctcaggacgcgagccgaggactctaccgcccgacccaggttaagtttcggaggctcctaagatggctgcagccgcttccaggcacctcctcttccgcggccccgcccaccgctacgtccgtcttcgccccggaagtggaagtcgtgctgaggtcagaaggcggaaccgctgctgggagacggcgggatctctttcgccatggctgccgggccgatctccgagcggaatcaggatgccactgtgtacgtggggggcctggatgagaaggttagtgaaccgctgctgtgggaactgtttctccaggctggaccagtagtcaacacccacatgccaaaggatagagtcactggccagcaccaaggctatggctttgtggaattcttgagtgaggaagatgctgactatgccattaagatcatgaacatgatcaaactctatgggaagccaatacgggtgaacaaagcattagctcacaacaaaaacctggatgtaggggccaacattttcattgagaacctggaccctgagattgatgagaagttgctttatgatactttcagcgcctttggggtcatcttacaaacccccaaaattatgcgggaccctgacacaggcaactccaaaggttatgcctttattaattttgcttcatttgatgcttcggatgcagcaattgaagccatgaatgggcagtacctctgtaaccgtcctatcaccgtatcttatgccttcaagaaggactccaagggtgagcgccatggctcagcagccgaacgacttctggcagctcagaacccgctctcccaggctgatcgccctcatcagctgtttgcagatgcacctcctccaccctctgctcccaatcctgtggtatcatcattggggtctgggcttcctccaccaggcatgcctcctcctggctccttcccacccccagtgccacctcctggagccctcccacctgggatacccccagccatgcccccaccacctatgcctcctggggctgcaggacatggccccccatcggcaggaaccccaggggcaggacatcctggtcatggacactcacatcctcacccattcccaccgggtgggatgccccatccagggatgtctcagatgcagcttgcacaccatggccctcatggcttaggacatccccacgctggacccccaggctctgggggccagccaccgccccgaccaccacctggaatgcctcatcctggacctcctccaatgggcatgcccccccgagggcctccattcggatctcccatgggtcacccaggtcctatgcctccgcatggtatgcgtggacctcctccactgatgcccccccatggatacactggccctccacgacccccaccctatggctaccagcgggggcctctccctccacccagacccactccccggccaccagttccccctcgaggcccacttcgaggccctctccctcagtaaattcacattttccttcctcctgttacattttcccaatatcttttctattccttggaccaatcagagatgctgtagctccttggggcaaaggtactaatccctttcagcacccccactccattcccctttttaatgtaactttttccacaggaggtatttcttttttatgttggtcctgagtattttgcaaatgcacagagaaaataaaactaaactccttgttt

SEQ ID NO: 690 - DNA, 2270 bp, Homo sapiens
ccgcagcagccaccgccgcagcagccgccaccgcatcagccgccgccgcatccacagccgcatcagcagcagcagccgccgccaccgccgcaggactcttccaagcccgtcgttgctcagggacccggccccgctcccggagtaggcagcgcaccaccagcctccagctcggccccgcccgccactccaccaacctcgggggccccgccagggtccgggccaggcccgactccgaccccgccgcctgcagtcacctcggcccctcccggggcgccgccacccaccccgccaagcagcggggtccctaccacacctcctcaggccggaggcccgccgcctccgcccgcggcagtcccgggcccgggtccagggcctaagcagggcccaggtccgggtggtcccaaaggcggcaaaatgcctggcgggccgaagccaggtggcggcccgggcctaagtacgcctggcggccaccccaagccgccgcatcgaggcggcggggagccccgcgggggccgccagcaccacccgccctaccaccagcagcatcaccaggggcccccgcccggcgggcccggcggccgcagcgaggagaagatctcggactcggaggggtttaaagccaatttgtctctcttgaggaggcctggagagaaaacttacacacagcgatgtcggttgtttgttgggaatctacctgctgatatcacggaggatgaattcaaaagactatttgctaaatatggagaaccaggagaagtttttatcaacaaaggcaaaggattcggatttattaagcttgaatctagagctttggctgaaattgccaaagccgaactggatgatacacccatgagaggtagacagcttcgagttcgctttgccacacatgctgctgccctttctgttcgtaatctttcaccttatgtttccaatgaactgttggaagaagcctttagccaatttggtcctattgaaagggctgttgtaatagtggatgatcgtggaagatctacagggaaaggcattgttgaatttgcttctaagccagcagcaagaaaggcatttgaacgatgcagtgaaggtgttttcttactgacgacaactcctcgtccagtcattgtggaaccacttgaacaactagatgatgaagatggtcttcctgaaaaacttgcccagaagaatccaatgtatcaaaaggagagagaaacccctcctcgttttgcccagcatggcacgtttgagtacgaatattctcagcgatggaagtctttggatgaaatggaaaaacagcaaagggaacaagttgaaaaaaacatgaaagatgcaaaagacaaattggaaagtgaaatggaagatgcctatcatgaacatcaggcaaatcttttgcgccaagatctgatgagacgacaggaagaattaagacgcatggaagaacttcacaatcaagaaatgcagaaacgtaaagaaatgcaattgaggcaagaggaggaacgacgtagaagagaggaagagatgatgattcgtcaacgtgagatggaagaacaaatgaggcgccaaagagaggaaagttacagccgaatgggctacatggatccacgggaaagagacatgcgaatgggtggcggaggagcaatgaacatgggagatccctatggttcaggaggccagaaatttccacctctaggaggtggtggtggcataggttatgaagctaatcctggcgttccaccagcaaccatgagtggttccatgatgggaagtgacatgcgtactgagcgctttgggcagggaggtgcggggcctgtgggtggacagggtcctagaggaatggggcctggaactccagcaggatatggtagagggagagaagagtacgaaggcccaaacaaaaaaccccgattttagatgtgatatttaggctttcattccagtttgttttgtttttttgtttagataccaatcttttaaattcttgcattttagtaagaaagctatctttttatggatgttagcagtttattgacctaatatttgtaaatggtctgtttgggcaggtaaaattatgtaatgcagtgtttggaacaggagaatttttttttcctttttatttctttattttttcttttttactgtataatgtccctcaagtttatggcagtgtaccttgtgccactgaatttccaaagtgtaccaatttttttttttttactgtgcttcaaataaatagaaaaatagttataatattgatcttcaaaaaaaaaaaaaaaaaa

SEQ ID NO: 691 - DNA, 2287 bp, Homo sapiens
gggtcgaggtcgacggttcgataagtttttttttttttttttttagtatttcagcaggatctgctggcagggtttttttgttttatttgtttgcttatttttaaattaactgttttgagctttgaatacttaaggctttagagggagaacccaattttcaattatgttggctttttataaagcttgagttatgtaagatttaaataaaagtttgctaccaagatgattgccttattgaataggtcactattaaattcctttaaatgttgatatctgccatttgtggaaacaacgtaaattctacttaagtgtaaacaaggcaagcctcagaccagcaataaattactcagtttggataacattattttgtgaagttaatcaaatttgccaaagtctttatctgcccctttaacaagttgagtaaaaataaaaggtattttttagtcaatgtgttccatgattttgcttaaattaatacttttaagtaatggaacttttttcaaaggcaaatttaaactatttaagaaatagctcctaatacttgggatcttgtttagagaatccactttctggaagttctcagcataattagtgttgagagtggttcagttgtctttaatgtttgtcatgtggaaatggaagtagcctctttttgttctgaaattgagtttattcaaagtgtaaaagcacatactgcattttctgctgaaagatcattatgtttaacaggcacttaatctcagtaaagtcagttgccagttaagttccacccagtagtcagtcccctttgtagttagtgggattatttgataattggttagatcatacttgtaaattttaatgctttgtgtaattggtttgaaaaacagtgaaatgggtaaacgcaaaacttttgtactttattacgagtaaagtgtaatgagtactgtggaaaccaaatttgaatactgcaaatttgtaggagttactaggttagcaattagtccatacatccataagcctgatgagttgaaattgcagtttgagaagtgaattaaccttacatccctttgttcagataccttaaaagttactttatttaaaagcatttattaatcttagtctgaaatcaaaatatagattaattggctcagctttaatacctttctaggaggtgtcacaatgtagggtaccaagggttggattgtgatggggcatggtcgtacactgctcattgtgccacaggtgtgactggaaagcatgatattctagggttggtttgtagattcaaataatccagaaatatacctaataagattgagtgaaaaatttgagtcaaatatctagggcattcacagagtagctgtgagttcttggtaatgtgaaaaaggccttgtttttcagaaactcctgggtttcctgttaaaaaatcttaaagcccaaccttaggaatatagtgccccaaaaggcggatgcttcttccattatcttattttctttgatactttatttaattagatgtttataaagaaatgggtttatttttccagcataaacctcagaatttaaggaaagaaaatgatgtctgttgttatagttcattgttttgcctactcagcagaaatgatgactcttaaaaattggctttgaccaaagttctcttgttttcagggaaagaacataaaagctttttgaactacagcctttttaaaagagggatgggaggatattacagtaagaaattaggctttctaaaagtatgaaacatccttcaactgggctctcttgttaataggacatcatatggtaatagactggtttgactatattgttagctgccacagtaagcaggtcattgtgtaggtaaatgcctgcacccataattttctagtaatagccacgaccaatttattaacagtcagggcctatccttgcctgtagttctcagtcactggatgcacaaaatcactgtgtaacattggctcacttggtgagcatagggttgactgataaaatgtttaattcccttgctagcttgtgagaagaatgagttgatgacatgctccataccagtggctagatggagtattaaggtggagcagaaaagaagtgagaacatcttgattcccctttcttttacttgatggtgtttatgaacatgccgtagtgcctttatggccagtttgagtcctgcctactttgacttttacgttcccattcctgtgttaccaccttcctcccgatttgttcacctattttgtgctttaaatctcaataaaatacttactgaggaaaaaaaaaaaaaaaa

SEQ ID NO: 692 - DNA, 717 bp, Homo sapiens
tctgtgcttgatgactgaagcttgcgggggtttaaactgtcctttaaaaacttaagttggttttaactgaagcacctaccattccagggaaagtcagggggaaacgcaaggatgtacacaaagccgggagtaactgctgttaccacaagacatgcgctcctccctcccgcccacctttatcttaggaaagatttttttttttttaactcgaatccttcaggtgaaaataaagcaacagcagcaacagaaaaaaaaaacgtagtcttcttcagggttaacatcagaagacaagcttgtgcggctttggccaatcagatgcgcccctggcagctataatatagtgctaaaggcagcctctctcacaagctctccaggcttgctaccatttaaaatcagactctttttgtcttttgattgctgtctcgcgacccaactccgatgtgttccattatcagcggccggcagcctgccattccagcccctgtctgggtggggagcggtggagagtcccccgcagccgcggcgggcaaggttatataggaagagaaagagcgaggcagccagcgagggagagagcgagcgggcgagccggagcgaggaagggaaagcgcaagagagagcgcacacgcacacacccgccgcgcgcactcgcgcacggacccgcacggggacagctcggaagtcatcagttccatgggcgagatgctgctgctggcg

SEQ ID NO: 693 - DNA, 1704 bp, Homo sapiens
cagtcaccggtaagttactgaatctgcgttggctgcctttcatgccactggtgctcctttgtggctatggaccagtggggggtgtatttcaatcctgtgcttgtttctttttgtcagagtttctttggttatcccctgagcatcttcttcatcgtggtcaatgagttttgcgaaagattttcctactatggaatgcgagcaatcctgattctgtacttcacaaatttcatcagctgggatgataacctgtccaccgccatctaccatacgtttgtggctctgtgctacctgacgccaattctcggagctcttatcgccgactcgtggctgggaaagttcaagaccattgtgtcgctctccattgtctacacaattggacaagcagtcacctcagtaagctccattaatgacctcacagaccacaaccatgatggcacccccgacagccttcctgtgcacgtggtgctgtccttgatcggcctggccctgatagctctcgggactggaggaatcaaaccctgtgtgtctgcgtttggtggagatcagtttgaagagggccaggagaaacaaagaaacagatttttttccatcttttacttggctattaatgctggaagtttgctttccacaatcatcacacccatgctcagaggtaagagatacctgaaaggaacttctgttggtcttttttagtaaggccaagtccgtgtcttcttcgttttgttctgttcttcccttctgccctgttttctagctgtcagctacatgctgggatgcacgttggaatctggagtaagtgcttccttccctgtgagtttcacctcctttttgtcttatttaaatcctcttatcccagtgaccactggagagtctaagccatccttagcatgggcatccatcttcctaaactgttattcatgcaaagtcatgctcgtggtaagaggtaagaggcaagagaggtgccttggaagccaagctggtggccgtagctgccattttagccttcaagctttgctccccagtgatatttctgtgacttagaagagttactggagtcaaaattgtattgattttttgtttgttttgttttgtttttagaaggagtcttgctctgtcacccagcctggaggcagtggcgtgatcttggctcactgcaacctccacctcctgggttcaagcaattctcctgcctcagcctcctgagtagctgggacaacaggcgcctgccaccatgcccggataatattttttgtatttttagtagagatgggatttcaccatgttagccaggatggtctcgatctcctgccctcgtgatctgcctgccttggcctcccaaagtgctgggattacaggtgtgagccaccacgcctggctaaggcaaagtttttttctttgctttcccatcatctcaagtatttccaaaagaactgctcagataaagagaatgggacagtgtcagtaactatcagaggtttgtgcttgctaatgctccatagagagtttgtgaatttcccatgtggaagggaatatgtggtgttactggtgacaaactaacaagaccatcctgtccacatttgaatcagattagattatgaaataaagatttcaggagaattgcttgaacctggtagacgggggttgcagtgagctgagatcgtgctgctgcactccagcctagcccacagagcaagactctgtctc

SEQ ID NO: 694 - DNA, 1825 bp, Homo sapiens
cgccgctcgccgcagacttacttccccggctcagcagggaaaggttcctagaaggtgagcgcggacggtatgcaaagttgtgaatccagtggtgacagtgcggatgaccctctcagtcgcggcctacggagaaggggacagcctcgtgtggtggtgatcggcgccggcttggctggcctggctgcagccaaagcacttcttgagcagggtttcacggatgtcactgtgcttgaggcttccagccacatcggaggccgtgtgcagagtgtgaaacttggacacgccacctttgagctgggagccacctggatccatggctcccatgggaaccctatctatcatctagcagaagccaacggcctcctggaagagacaaccgatggggaacgcagcgtgggccgcatcagcctctattccaagaatggcgtggcctgctaccttaccaaccacggccgcaggatccccaaggacgtggttgaggaattcagcgatttatacaacgaggtctataacttgacccaggagttcttccggcacgataaaccagtcaatgctgaaagtcaaaatagcgtgggggtgttcacccgagaggaggtgcgtaaccgcatcaggaatgaccctgacgacccagaggctaccaagcgcctgaagctcgccatgatccagcagtacctgaaggtggagagctgtgagagcagctcacacagcatggacgaggtgtccctgagcgccttcggggagtggaccgagatccccggcgctcaccacatcatcccctcgggcttcatgcgggttgtggagctgctggcggagggcatccctgcccacgtcatccagctagggaaacctgtccgctgcattcactgggaccaggcctcagcccgccccagaggccctgagattgagccccggggtgtgctaaagaggcagtacaccagtttcttccggccaggcctgcccacagagaaggtggctgccatccaccgcctgggcattggcaccaccgacaagatctttctggaattagaggagcccttctggggccctgagtgcaacagcctacagtttgtgtgggaggacgaagcggagagccacaccctcacctacccacctgagctctggtaccgcaagatctgcggctttgatgtcctctacccgcctgagcgctacggccatgtgctgagcggctggatctgcgggggggaggccctcgtcatggagaagtgtgatgacgaggcagtggccgagatctgcacggagatgctgcgtcagttcacagggaaccccaacattccaaaacctcggcgaatcttgcgctcggcctggggcagcaacccttacttccgcggctcctattcatacacgcaggtgggctccagcggggcggatgtggagaagctggccaagcccctgccgtacacagagagctcaaagacagcgcatggaagctccacaaagcagcagcctggtcaccttttctcttccaagtgcccagaacagcccctggatgctaacaggggcgccgtaaagcccatgcaggtgctgttttccggtgaggccacccaccgcaagtactattccaccacccacggtgctctgctgtccggccagcgtgaggctgcccgcctcattgagatgtaccgagacctcttccagcaggggacctgagggctgtcctcgctgctgagaagagccactaactcgtgacctccagcctgccccttgctgccgtgtgctcctgccttcctgatcctctgtagaaaggatttttatcttctgtagagctagccgccctgactgccttcagacctggccctgtagcttt

SEQ ID NO: 695 - DNA, 2988 bp, Homo sapiens
acaaaagcaaaatgggaaaatggcaaacagatccttttcaattagctgctgcatttatctcttcccccaaaagagaatcttctgctgcttctgcttcttcatctgcacaacggggatgtagccatcatacatgcctgcaaggctgtagtgagatcctggacatgaaagcattctgaaaactgaaaagtacaatgcacctgtgtttctgcctaagctctctaagcgtgacagcaggagcgcccgggtctccatcccggagagatgtgtccacactccgccgccactgctctcttcatcagcaacttgcttctgcagtcgctgcccaaagtttcgcggagcacccggcgacctggccgtcggtcaatcctgagaagcccagggattcggggcgcggagactgggggctgggccccgggaatcccaaagacgtccccgcggccaggaagggagtgacaggtgcgacgcgcggtcgcgggcggcgggagagcggaccacggaaaccgcgtgtgggcgcgcgagggaggcggcggccacgcgctctccttaggccgctccctgagacgcccccgcgacgtccctagccccgcgctctggaacccgcgaccctcgcgccgctttcggccccgcggcgccccagatcccacggcctcccggagcggcgcagctgggtcgggctcacgctcgcagcgccggaagggttgaggaccgccgggggcaccgtgcgcacggggttcttcccgcgcgaaccggggctgtcggggggtgggcgcacgcgcacccgggcgcgccgccgtaaccccttcctccccgcgcggcccccgcactcccacccacccaccactcaccgtcgatgtctcccagggtcagctcgtcgcccagctccgtgagggtctccatggtctccagaccacccagctcgccgctgtcgtccatcgcccggctcagcgcagaagccccccctgccgtcccgctcagggagacgcgggggcggtgccgtcgccaccgcccatgacacccgacaacccccgcccggcaccgcctcaccgacgggtgccacccgccgccatgtttgcgttgcgcccgggcgccgcacagaaagggcggggcgggattcccccgccccagcccgcgccccctgcggccccgcctccaggccgcgcgcccccctgtttgttgtcaatgggaccaggctcatctcagccaatgggcgagcgaagcggtgcgtggggtgatggcgcgtcatcgatcagcagctcagatttgcatagtgaggtccctccccccgcggcctcggagcgaatgcctggagtagccgtccggtcatcatcttaaccttctccgccttgtttaaaggagccgctgccttctccgttggatctgcgccacacgcaagtccgtccactggcctgggagtgaagggttaacaggccaccctccacctgcgaccgctggccgcctccaggcctggctgggagcacattacgtcatcttcccagctgcctacccccgccctgcccgcctgagaaagccagcggagtcaaacctggaccccagcgctcgggacgggagtccgggtcatccaagtcccgcttctcccagcctccttacaaaggcgggcacggaggcttgacaaggttgcagattgtcccagggcggtcaggattttacgtcttctgctttgcacccgccgtgacctcgcgcttactccagtggtcctcaatctctggcacctcggaaccactgaggacctgaaaaccacgccagtgcccaggcccaccgacggcctcctgagaggggggccccgggcacgagttttttgaaaaagttccaccgggattctgaagtgcagcccacccactccttcaagcacctcactgccccatcttgcagctggtcgtgttgtaaacttctaggaatttatccaaaggaataaaaattacaagtgcttaaagaagtgctgtaactaggaagaagtgagaataaggaaatgaatatgtaaattacatccacacgatggaataccatgggatcattaaaaattacgcacacaaatgtatatttattagcaagaaaaggcgttcacaatatattgataaaagggaaaagttgaagtttcctgccagtttgtgagaggcagctgttgcttagtgatcaataattaagaacacacaggctgtgtggaggcagacacatggatccactaattcactgtgaccttgggttaattgttctaagcctcagtttagtcatctctaaaatggggataaaatagcatccctcatagctgtggttaggtgagattatttgcacattcaattgacaatatttattgaacatctctgtggcagggaaacaaatggttcctgccctctgagagcttccagtctagcaaaaaaaaaatcagaaatcccacacccgtattaaacataaaaataaattacagatgatggtacaagtgatcaaggaaaggtaatggatgtgatgaaactaacaagggccctgacttgtgctgtcaagaagcctctgaagaagtgacatttaagatgaaacctaaaattatgagagaactgcagctgttacagccaaaggggaaatgatgacatggacaaaggcctcgaggcaggaggagctgctggcagccagctctcggcataagctttggcatacagtaagtgccttgcatactgctgtattgcaattgaaaaaataaggatctggccaggcgcggtggctcacaccggtaattccagcactttaggaggccgaggtgtgcagatcatttgaggtcaggagttggagaccagcctgaccaacatggtgaaaccccgtctctactaaaaatacaaaaattagccgggtgtggtggcgcatgcctgtaatcccagctaaccggtaggagaactgccggaacctgggagatagaggctgcagtgagctgagatcatgtcgctgcactccagcctgggagacagagcaagactctgtctc

SEQ ID NO: 696 - DNA, 2340 bp, Homo sapiens
tcggctgcggctgcagtggtggtggcgggtaccgcacggggtatggtccccgggtccgagggcccggcccgcgccgggagcgtggtggccgacgtggtgtctgtgattgagggtacggccaacctgggaccctacttcgaggggctccgcaagcactacctgctcccggccatcgagtattttaatggtggtcctcctgctgagacggacttcgggggagactatggggggacccagtacagcctcgtggtgttcaacacagtggactgcgctcccgagtcctacgtacaatgtcacgctcccaccagcagcgcctatgagtttgtcacctggctcgatggcattaagttcatgggcgggggtggtgagagctgcagcctcatcgcggaaggactcagcacagccttgcagctgtttgatgacttcaagaagatgcgcgagcagattggccagacgcaccgggtctgcctcctcatctgcaactcacccccatacttgttgcctgctgttgagagcaccacgtactctggatgcacaactgagaatcttgtgcagcagattggggagcgggggatccacttctccattgtgtctccccggaagctgcctgcgcttcggcttctgtttgagaaggcagcccccccggccttgctggagccgctgcagcctccgacagatgtgagccaggacccgaggcacatggtgctggttcggggactcgtgctgcctgttgggggtggctcagccccaggccccctccagtcaaagcagccagtccccctgcctcccgccgcaccctcaggtgccactctctcagcagccccccagcagcctctgccccccatccccccgcagtaccaggttcccgggaacctgagtgcagctcaggtggccgcgcagaatgcagtggaggctgccaagaaccagaaggctgggctgggccctcgcttctcgcccatcacccctctccaacaagctgctcccggagtgggtccccccttcagccaggccccagctccccaactacccccaggaccccctggcgcccccaagccaccacctgcttcccagcccagtctggtctccactgtggcccctggctccggcctggctcccacggcacagcccggggcaccgtccatggcaggcactgtggccccaggaggggtgagcggcccttccccagcccagctgggagccccagccctcggtgggcagcagtcagtctccaataagcttctggcctggagcggggtcctggagtggcaagagaaacccaaacctgcctcagtggatgccaacaccaagctgacgcggtcactgccctgccaggtctacgtgaatcatggcgagaacctgaagacggagcagtggccccagaagctgatcatgcagctcatcccccagcagctgctgaccaccctgggccctttgttccggaactcaaggatggtccagttccatttcaccaacaaggacctggagtctctcaaaggcctctaccgcatcatgggcaacggcttcgcgggctgcgtgcacttcccccacacggcgccctgtgaggtgcgcgtgctcatgctcctgtactcgtccaagaagaagatcttcatgggcctcatcccctacgaccagagcggcttcgtcaacggcatccggcaggtcatcaccaaccacaagcaggtccagcagcagaagctggagcagcagcagcgaggaatggggggacagcaggcacccccagggctggggcccattctggaggaccaagccaggccctcacagaatctgctccagctccgcccaccgcagccccagcctcagggtaccgtaggggcctctggggccacggggcagccccagccccaaggtactgcccagcccccgccaggtgcccctcaaggccctcctggagcagcttctggcccaccccctcctggacccatccttcggccccagaaccctggggccaaccctcagctgcgaagcctcctcctcaacccaccaccgccgcagactggggtgcccccaccccaggcctccctccaccacctccagccaccaggggctcctgcgctgctgcctccgccgcaccagggcctggggcagccccagttggggcccccactcctgcatccaccacctgcccagttctggcccgcacaacttccccctcgggctccactgccaggtcagatgctgctgagcgggggtccccggggcccggtcccccagccgggcctgcagcccagcgtcatggaggacgacatcctcatggatctcatctgaatccccaacacccaataaagttcctttttaacacaaaaaaaaaaaaaaaaaaaa

SEQ ID NO: 697 - DNA, 1335 bp, Homo sapiens
ggctgcaggtggcggcgcagtctcggtaggcggtatgagtttggctgggggccgggcaccccggaagaccgctgggaaccggctttctgggcttttggaggcagaggaggaagatgagttctaccagacgacttatgggggtttcacagaggaatccggagatgatgagtatcaaggggaccagtcagacacagaggacgaagtggactctgactttgacattgatgaaggggatgaaccatccagtgatggagaagcagaagagccaagaaggaagcgccgagtagtcaccaaggcctataaggaacctctcaagagcttaaggcctcgaaaggtcaacaccccggctggtagctctcagaaggcgcgagaagagaaggcactactgccattagaactacaagatgacggctctgacagtcggaagtctatgcgtcagtctacagctgagcatacacgacaaacgttccttcgggtacaggagaggcagggccagtcaagacggcgaaaggggccccactgtgagcggccactaacccaggaggaactgctccgggaggccaagatcacagaagagcttaatttacggtcactggagacatatgagcggctcgaggctgataaaaagaagcaggttcataagaagcggaagtgccccgggcccataatcacctatcattcagtgacagtgccacttgttggggagccaggccccaaggaagagaacgttgacatagaaggacttgatcctgctccctcggtgtctgcattgactcctcatgctgggactggacccgtcaacccccctgctcgctgctcacgtaccttcatcacttttagtgatgatgcaactttcgaggaatggttcccccaagggcggcccccaaaagtccctgttcgtgaggtctgtccagtgacccatcgtccagccctataccgggaccctgttacagacataccctatgccactgctcgagccttcaagatcattcgtgaggcttacaagaagtacattactgcccatggactgccgcccactgcctcagccctgggccccggcccgccacctcctgagcccctccctggctctgggccccgagccttgcgccagaaaattgtcattaaatgaagagatgtctagtcctcagaaacttctttcctgccctgattggggctcttgctgttccgtttcttctccctgcttctcccctttgtcatctctgatctttgcctaatctgtttctttttccttttcccctagttcttacaggtttcgttgtgttttttaatctaataaaatagaaagatcaaaaaaaaaaaaaaaaaaaaaaaaaa

SEQ ID NO: 698 - DNA, 8456 bp, Homo sapiens
agatacattagaaaaaaaccatcggaagatacgcatagcattggcagtttctaaaagaattaattcccttcctgtgttcattctgtgattactgggatagaaatgctatttgcattaccagcctttcattcagttacagagacgtgagtgctcgaaggagagacagtgatttttgccttaaattcagcctgtccaaatcggataagatctccgatttgctttaagccccgttatcactgccttcctctccaacaacagctgctgtgatcacgcacaaacggccaaacgggggcaaatccgtgccaaagcagggccatgggctttcctgatcagaaggcctagccccagcccccaggcgcagcacacgggcggttcctttcagaaacccagcctgcctcccaccagctggagtgggtgggtggggcggtagtggtgccagtttcagggaacggccggcaaacccacctccaggcgtgctccagcgggagcctggagaccctaggagagccctccccacaagcggcttccaggcaggacgcttccagaggtcttggtccaggggtgggggtgaggtggggtctacctttgaaacagctacaatttaaacttcagctacaccgagctcaaactcgattccgcagccgagtgtcggcgccagagaaggataaaaactcgggtctacggctccccaccacgcccctggtccggtcctctgggcttccaggagtcctcacgccatcctctgggttgcccaggaggaaggatgggcggggcgggcaggcgctgcgggcgctgcagatggggagggcgagcccgcggcacggcgtgagcgggggagaggcgcgcgagcaggtgtcggctccgtgacagggtcccccatcccgcgccccagtgctccccgaggcttagtgaggcaaaacccagcaaatgcttcagaaatgcagctcagtcggtcaccgggttctgcttcctcatcagacgcgcaagaggatggcgcttccaatgcaaatctcttggctccggccccttggctggcagccgccgcgtcccccgcctgcctggcgtcccgcccactccgtggcgggctgagacgaggcccggcgcggaggggacggggcggagcgggcatccctccccaccccccacgtggggctggccctccgcagtgcctgggcgcgctgcagtcgccgcgcctccccggccgcggcaccgcctttctaggcaggggcgggggacgaggggcaaggagtgggcgaggggtgggcgaggggcggggggcgtcactcaatcaggtggcctctggagtttccccggggcagggcagagggaacacgctgccggggattgtgtacacgctccactgacaccagcttcacgctgccgggcagtcgccgatcacgcgtggccccgcgagcccattggccggcgcctcacacacctttgccgttgattggccggcctcaggctccgcccccacccccgcccgcggcgcggggcaggctgagcggctacctgaatggggagggggcagacggcgctgagcgcggcggcggcgggagcggcgtcgagtgtctccgtgcgcccgtctgtggccaagcagccagcagcctagcagccagtcagcttgccgccggcggccaagcagccaaccatgctcaacttcggtgcctctctccagcagactgcggtaagtcatttggggatgcccctgtgcttcctcgcctggtcttgtctggggggccaaagggggcgcgaaccccgagccccggacatcagccatgcctgagaattggggctgcagcggagtcgtggggaaggaaagggcttcctgcctgcagactatgggcattagtgagggcgtgtgtgttggggagggggtcgaaccagggggctgggatcttcagacagggacaggggtcttgctctagatgtactgaggggaagggacaactccgcatggagacccgagagggctggtgaggaggaggatgacgagcgggggaggagtggggagggggccgttgccctgcagcgaggttggggtacagtgtggaacgagagtcgcgggagggacaagggggctaccctcacctggtaccgaggagagatgcccggtctggctcaggaacgcgagccaggggaggaaggggctgctcgcaagcactcgggaggcggggtgtccacaggagaggcgagtgggctacccatcctgggggtctgaacccacgcttggaagacgggggctgctcagcagatagctcggggctgggggaaggggcgcctgtcgtcggagcggggggatgacacgagggcccgccgacagccctgggggacgagttgctcccccagacgtctggagggggactcttaccccaggggcaggtggccgccttctgacgactccttggaagaggcggggagccgcctctggggcaggagggtgggaagcgggacccagcagctggggcgggaaggtgggcggggggagctgggccgcgagacgcgggggccgcgcgtctggagccggggcctgtgggggctgcacgtctgggaacccgtggagacgcgcggcgggaggggcctggagctgccggaagccacggggagggggcgccgcgtctacagggaagagacggggtggtctgaggtcccgtgggccgcgtgggcgggaagtgccgagggctcggccgggttcccgggggctgccggcgggaggagggcggcggccgggtttccgcggggacctggctcctcctcccgcatctgaggcggaagccgggggtgggccgggagcgggtgcgcccggggaagcttctcgtccccgagtgacccagccccggcctccgccaggggcgggagcaagcccggccccgctgtcggttcctaagggaacggcggctcgcggggagctggaaggggcgggcgcctcccggagcctggcgcccgcagccccgcccctccccgcgggcccggcgcgcacggccgggcggttggcggcggcgcccgcggcccctcccccgggtcgggcgcgggcgggggcccgcaagctcaggaagtaggggaaaggtgacggcgcggcaattcccagttcacgtttcctgcgcctcccggagcagccgctgatcacgctttgttcacatgcctcgccccctcctcgcccacgcccccgccccgggccgcacagccaatccgggctcgggccgccgagccggccggccaatggcgggggcaggggcgcggggacgtgcgagcggcgaggaatgttcccagtgactcacccgtgagcctcattgaggttagggcggccccctccgtcggtctccgccagctaggatctcccccgccgtccgcccccgcccctcgtctgcctcccccgcccgcgcctccgcccgcgcttccctttcctgcctcgcgccccactccctttcctcccctccctgtttcccttcctgtccttcccagctcacgctctctttccctgccgcctgcctttcttttttcctttttttgcattggcgtcttggggctgttacacacacgcgcgctgtccattgcagcttacataaaggcgggcgcgattatgcaattatattgttagcgatatttcaagagcaatggctcgttttcttaggatttcaacacgaaggcatcatgcatttttgaaaaactagtattgagaataataccttgcaacgtaaagaatgttttttggtatttttacacaatctctactttgaccaaacgagtctggacagttttcttttaatggaaaataggagaaatggtgagtagtaccatttttttttagcgtagttcaaagaactttactataaaacattaggtagttctacaaataagtgcaaaacctgtgctgttattttgtcatcaagcagttctttaaggaattaaaatagattctactttgattatgctgactttttaaagtcggtttttgcaaattccaagtaaaatattaaattttttgattatccagtttttagtaatattgcattagctatgttgtagttatgtatggcaaaccattgtgtcaaatagattcagtaaaagggagcacaaatatgaagaggttgaaagttaattaaaataaacattagaatttttttctatgtatatcacttgatttttctttaccataatcaagtgatcaaattttagatcttaaataatgcaattttaacttgaaagataccctgaggatcccttatcttttgatttttatcccaaagtgcaaagtgactttccaaaggtcagacccataacaacaggccagagctctactacattttgtctttattagaaggttttggctattttttttttctatcagcaatttgtacctcaaaagacctcataccatacctgtaatatttaagaagataaattttttgccgcactcttagtttttttgcccgactccagttgcaggtagctactctggaaagtctatataaaatactccttttcttcttagccaaatacttctccttttggatcacaaatgcattgataattttcgtcttagtccccttaatggtagtaggtgtgcctctctcccatgaacggatatcgctttatcagtgttaaagtctaaatgttaacagaaaaaatgaggaagattttattgccactactgtgaggtttgggttacctacctaacaagtgtagctgaacttccttagtatcatagtaagtgtgagaggaaaattatttctgattttaatttggaaagttgtgtgagttgtaaaaaaaaaaaaaaaaaaaatttgctcatttttctgtgtgtcatttggatgacaaaaaatatgcttataagctttcctcttttgtttttataggaggaaagaatggaaatgatttctgaaaggccaaaagagagtatgtattcctggaacaaaactgcagagaaaagtgattttgaagctgtagaagcacttatgtcaatgagctgcagttggaagtctgattttaagaaatacgttgaaaacagacctgttacaccagtatctgatttgtcagaggaagagaatctgcttccgggaacacctgattttcatacaatcccagcatttgtaagtattattgtttttaagatagacgtaaattatataatttcttaaaatttatataataaactgtagatttctcatgcttatgtatttcccttttctttagtgtttgactccaccttacagtccttctgactttgaaccctctcaagtgtcaaatctgatggcaccagcgccatctactgtacacttcaagtcactctcagatactgccaaacctcacattgccgcacctttcaaagaggaagaaaagagcccagtatctgcccccaaactccccaaagctcaggcaacaagtgtgattcgtcatacagctgatgcccagctatgtaaccaccagacctgcccaatgaaagcagccagcatcctcaactatcagaacaattcttttagaagaagaacccacctaaatgttgaggctgcaagaaagaacataccatgtgccgctgtgtcaccaaacagatccaaatgtgagagaaacacagtggcagatgttgatgagaaagcaagtgctgcactttatgacttttctgtgccttcctcagagacggtcatctgcaggtctcagccagcccctgtgtccccacaacagaagtcagtgttggtctctccacctgcagtatctgcagggggagtgccacctatgccggtcatctgccagatggttccccttcctgccaacaaccctgttgtgacaacagtcgttcccagcactcctcccagccagccaccagccgtttgcccccctgttgtgttcatgggcacacaagtccccaaaggcgctgtcatgtttgtggtaccccagcccgttgtgcagagttcaaagcctccggtggtgagcccgaatggcaccagactctctcccattgcccctgctcctgggttttccccttcagcagcaaaagtcactcctcagattgattcatcaaggataaggagtcacatctgtagccacccaggatgtggcaagacatactttaaaagttcccatctgaaggcccacacgaggacgcacacaggtaccagccacttcttatatctttagtgtttaaatgaagagattttggctgtgatcacacatttaaacccaggatgataaggaataacttgcctttagctagtttagaggatggtatttaccagtgcaaggtcctccaaaaggctgtattggaggccgctcacgagtgccataatccttgcactttaggagaccaaggtgggaggattgtttgagcataggagttcaaaaccagcctgtgcaacatactgagacctcatctctacaaataatttaaaaataagtatgtaaatactttattgatgtgcttttgtttcagtctctcaaatgatgattctgtagatgtctgagtagttactttaataaggtatctttaaagcctttgaatcatagttaaagtcaggaagtcttttcatttttggctttttttaagggagaaaaaaaaactgctctgttgcccaaactggtctcaaacttctgggctcaagctatcctcctgccccagccttctgagtagttgggactacaggtgcctactactccacccggctgccttatttcatgtggggaagagttttgtaaatgtgatcaagtgacaagttgaaattggagcaatacatatctcatattcatttgacagtttgatttattagcttttattatttaaaatgtatcttctcatatacttttagacagaattgaacatataatttacggcaatcttatgcataataatgatttgtatgtctttgttttaggagaaaagcctttcagctgtagctggaaaggttgtgaaaggaggtttgcccgttctgatgaactgtccagacacaggcgaacccacacgggtgagaagaaatttgcgtgccccatgtgtgaccggcggttcatgaggagtgaccatttgaccaagcatgcccggcgccatctatcagccaagaagctaccaaactggcagatggaagtgagcaagctaaatgacattgctctacctccaacccctgctcccacacagtgacagaccggaaagtgaagagtcagaactaactttggtctcagcgggagccagtggtgatgtaaaaatgcttccactgcaagtctgtggccccacaacgtgggcttaaagcagaagccccacagcctggcacgaaggccccgcctgggttaggtgactaaaagggcttcggccacaggcaggtcacagaaaggcaggtttcatttcttatcacataagagagatgagaaagcttttattcctttgaatattttttgaaggtttcagatgaggtcaacacaggtagcacagattttgaatctgtgtgcatatttgttactttacttttgctgtttatacttgagaccaacttttcaatgtgattcttctaaagcactggtttcaagaatatggaggctggaaggaaataaacattacggtacagacatggagatgtaaaatgagtttgtattattacaaatattgtcatctttttctagagttatcttctttattattcctagtctttccagtcaacatcgtggatgtagtgattaaatatatctagaactatcatttttacactattgtgaatatttggaattgaacgactgtatattgctaagagggcccaaagaattggaatcctccttaatttaattgctttgaagcatagctacaatttgtttttgcatttttgttttgaaagtttaacaaatgactgtatctaggcatttcattatgctttgaactttagtttgcctgcagtttcttgtgtagatttgaaaattgtataccaatgtgttttctgtagactctaagatacactgcactttgtttagaaaaaaaactgaagatgaaatatatattgtaaagaagggatattaagaatcttagataacttcttgaaaaagatggcttatgtcatcagtaaagtacctttatgttatgaggatataatgtgtgctttattgaattagaaaattagtgaccattattcacaggtggacaaatgttgtcctgttaatttataggagttttttggggatgtggaggtagttgggtagaaaaattattagaacattcacttttgttaacagtatttctcttttattctgttatatagtggatgatatacacagtggcaaaacaaaagtacattgcttaaaatatatagtgaaaaatgtcactatatcttcccatttaacattgtttttgtatattgggtgtagatttctgacatcaaaacttggacccttggaaaacaaaagttttaattaaaaaaaatccttgtgacttacaatttgcacaatatttcttttgttgtactttatatcttgtttacaataaagaattc

SEQ ID NO: 699 - DNA, 3029 bp, Homo sapiens
  misc_feature (1304)..(1304): n is a, c, g, or t
  misc_feature (2102)..(2102): n is a, c, g, or t
cgacgcccgggctggtctgttcattggaggtatattccttttctgctcctccccagggagaagtggaagttgttgttgtcttgtttgtttttctcaatcttgccttgctggggcagataggagggaggacatgagctttgatgctattttatgctcacctggggtgctggaacttatcacaaaggcagttggattgtttgttattgttgaatccttgtcttcatggggaaagaaaggcctggggtttcttgttttgccatctggctgaccacactcaaatgttacctgttttttttagacattatcttagcaagaatggtaagtctttgaacttgataggaatttgggtgggttcaagctttcaaacttttttttgtaatatatccatttgggaagaggtgcagggaggaagaggtggtgattataagtaaggaagtgtggaaaaagttgtaaattcttgaagaaagcatgaggtaaggttttactcctgtttttttttttttatccctgtgtgccctttagttcagtttagttcatacaaattagatagacatgagcctctggttgagtctaatcttgaaaatattttctttgtgatggggttggttttagaagagtagcctggaatacgaaagcttttatttgtatggttatcatgtgtcttcaacctttatgtcaataattgcagacttagaatagcagttctaagttaatggtaaaatgttacctactttcgattccatagcatctatcttctttgagtactttcttagagtgtgattttaatgattatgatctttgttctaactattttgaggcctcattaaaaaataaattatgattttattgttagaatcgtttctataaattaacgtcactgcgcctggcccttaaatgtaaatttgtttttatcaatcaactgtttcttcataaaaagcaaagaatacgattagaaatttgaagactatctggtattttaaaaataaagttcatctttctggccggctagttcatcgtctaacttttgcagaagtggaatgtgaatgtgaaaactttgtgaaacagaattattttcttttatccaaagctacttttaattgtctttgagcagtgttaatggaaaaacttataaatgtaggaatgtataagaatatagtttaaaatctagtaaaatgagttatttttaatacttttattttgaaatattattaaatctttaattgtatataaaacttactgcattgtgaaattataattaacgtttgagtttcctgaggatatattaaattcctatcttcgtttanacttttcagaggtcatgtattttgatttttaaacatacttaatgatacaatttttaaaaataaaaactttaaagcggaattgaaattgcatactgcttgtttaaatgcacaaaatctctgtatctcctattatctgtattctgtttctttaatttctactaaaatttgaaggcctctgaagatattttaattctcattgtgtcttttgagttattttttgattctgaaaagataggccatcacaatatctttttagtgggatgtcatatttgtcggcattaaggaatcccagaaggagagaagtatattctctgctgctcttaagaagacaagggaatttgtagaccttggaaatttgatttgacatcctcatctgctgtaggaatgtttagaattaagatcaccaacctgtgcctccttgaaactggtagagaaactgggatcagtattgggacacccagagctgatatgtgaggaattattggcatgatctacaaatgtgtgaaatttgaggattttataagccatttcagtcatatcagtgtttattaactacataggttaatattttgtgtaggtcatttttgtttatactgtagtcttcagtagcttaatggtgggaagcttacatctggaagcttttggggctcctgcacctagccaggttcagtcattgtgattctgtaacttcaccagaactcaaatttcttgggaggttttgaggaccacaaaaattaacttgagtccaggtgtggtggctcacacctgtaatgctagcactttgggaggccaaggcangctgatcacctgaggtcagaagttcgagaccagcctggccaacatggtgaaaccttgtctctactaaaaatacaaaaaaaaaaaaaaaattacctgggcatagtggtgcgcacctgtagtcccagctactcaggaggctgaggcaggagaatcacttgaaactgggaggtggaggctgcagtgagccaagatcacaccattgcactctagcctgggtgacagagcaagactctgtctcaaaaacaaaacaaacaaacaaacttgatatcttacagaattgggaaatgtttgtatttttggattgctggagactgctctagtgattctggtgactatacccacgttttgggctcagtcaaaactacaggttcatgttgtataataagagccagacggtcagtaaatagacctgtgttttctttagatttaaaaaatcagtctgaaagataattttgccattaaaaaagaaaacccatgtcgtgtgtccatactcattgtctaccccttggtaggttatttaaatttgattttttggttaattttagactctttttgatcagaacaatgctgcaaaaaaagaagagtcagaaactgccaacaaaaatgattcttcaaagaagttgtctgttgagagagtgtatcagaagaagacacaacttgaacacattcttcttcgtcctgatacatatattgggtcagtggagccattgacgcaggtaattattgctaaaattgattgaaattaggagatgtgcatctatatttactttttaatatgttgataaaattattgtaattacttgctttggaaatttgtaatttcatctgtcatagtcaaagtagggtgaaagatctagaagtagaaatgtatttacttctttttggggattaaaaaccgtcagaagaggctgagcgcagtgggggggg

SEQ ID NO: 700 - DNA, 28244 bp, Homo sapiens
gatctggaccctggccacccatgggctgatggagcagcatgtgtgggacgtggccatcagcctgacaacggtggtggtggccgggcgtttgctggagcccctctggggggccttggagctgctcatcttcttctcagtggtgaatgtgtctgtagggctgctgggggccttcgcctacctcctcacctacatggcttccttcaacctggtctacctgttcactgtccgtatccacggcgccttgggcttcctaggtggcgtcctggtggcactcaagcaaaccatgggggactgtgtggtcctgcgagtgccccaggtgcgcgtcagtgtgatgcccatgctgctgctggcgctgctgctcctgctgcggctcgccacgctgctccagagcccggcgctggcttcctatggcttcgggctgctctccagttgggtatatcttcgcttctaccagcgccatagccggggccgaggggacatggctgaccactttgctttcgccactttcttccctgagatcctgcagcctgtggtgggtttgctggcgaacttggtgcacagcctcctggtgaaggtaaagatatgccagaagacggtgaagcgctacgatgtgggtgccccatcctccatcaccatcagcctgccaggcacagaccctcaagacgccgagcggagaaggtactgtgaaattttccaaaatcttgtcaagctaggagcatactggtcgagtcacatgccatctgttgaggtgttcgctgtacataggtggagacctacagtcaggtattggggcacatccggaaagacaaaatcagtctttggccttaaggaactcagcagttaggtgtctggggtccacgaggcacttttctcaccactcgggccacttaataagtctcaagaaatgcagtttcctttggtgctgtgaagtcccagtggagggacacagaaccctggccttgcctcagaatctcagaatcctagacattgggcctgtgggagccagaagcaacctgctggtactttcccctgtgaggaagggacagggaaggaggcctggggtcctcaaaaggtgatctgggccactccaatttccaaatgctgtgtcctcttcctgggctttaactcagatgctgtgcttctctgccacttacttattgagagggaagcttggggtattaccacatttacctctgtctccagcaagcatgtgtcaccaaaaccagggacaggctacatgacccactgagggagcctgctgacaccagggagtggcgatgaccctttcattatctgtaaaccaagctatccacagcatcaggagtcccagctgaattattcactgaatgcactttggccagggcaggagggatctttttaaattcagcttactctctctcccagatctgtggagccagcagagtggtcccagccttcataagatccacagctccatttccaacattattcctcactgttttgaggcaattactcgagtagtaaaatctgggacgggctttgtcttttgcattgccaaggctcctgcttttgctcacctgtgaatggggttgtggcaggaagctctatgaatttagctgcagttatccctgtatttactctccactgggctatggaattgagtgtgggacacactcctttcttgaaggagttccagctggggaagggccacagatcactatggcccaaggtatggtaggtgttgaaaagtatatacagcatgctgcagggcataattctgggccctagagcttgggtctttataggtgataagccctaaggacagaagtctctcttaaccttagctggtattaaagatggggccaggtgagctgggcctggtaggaattgagctgtccctcagagccattcaggtggggccaggccagtggggacccctcctccactgagaggtgttggaatgttagggttggctggacattcaaaaacctctgcctaggcccaagaaaatggacaggggggaagcaggttggtggggaggaagggagggtcaagaggcgggttcttggcatagccttatggttgttagcttacatgggggtggcggttattcctccagccagtttgacatctgactgcatggccacgcccaactccaaagggctaccaggagagggaggcagggtttcctatctgtctctctggtccttgtgaggaagtgactagcgtaacactagctctctgccttggcaggctttagatggaactggcaagggcatcatcaggatggcagcctgggtagcagcagggaaagactgtcctgtctataccaacttgtcatgtgtgagactgacgggcaggggggaagcgtgctagggctttctacacctgtgcccttgttgcctctcttgtcgtgttccctgacatggtggagattttggttctcagctggaacctgaaaggctacacaggctgtccccacattggtggcacagagaggctgaggtataggagtccacagtggtcactgttgaaacggttccctggcagctgcagcactccaccttctggtgggtcagggtcccaagcacatgtgtaaaccttcttctgttggactttcccacctgccctcaaagtggggcctctaagggtccaccctgtggaagcagtaggctctggcctgtgcctacccatgtgagctgtttctccttcttctcctcttgcaagggctccgctaagtccctgctctaacaagggccttggtggctttgggggttcttctgagagggagaatattagcatcagttaggaggggtagactcacccaagttggccctgcttcctgggctgagagccaagggaggtgttgaattccagccttccccattgacccttgccaggaggctcaagatacccctaaccaggagagggggagaattaataacccttcccttggatgtgatgccagcacccaggcagaaactcctggaaactccagaacttgccgttccacccatctgccctagggcactagttccactgacccttagataccaccctcagaaccattcctggtggctggcctcgtgggcagtctggcagacacccagctgaccttcccatcccggaggtgcctcagctatggagggaagattcttagagcctttgggttatcattctgatggcagagtgggtcctaaaccaatctctggggagtcccaggctctgcatggtgaaggggaaacataggattctgggggaggagtctaggtggtacggtgaggagtcagcctgctgcggaagggtagagggcatgagccaaggccaaacccagagtgacctttcctctctcctctggccccaggcaactggccctgaaggcactcaatgagcggctgaagagagtggaagaccagtccatctggcccagcatggatgatgatgaagaggagtctggggccaaggtggacagccccctgccctcagacaaagctcccacacccccagggaagggggctgccccagaatccagtctaatcaccttcgaggcagctcccccgacgctgtaactccagaccaccttgagtgtggcacctcccctcccaagccccccttgacatcctctcagctactccagggcacctgactgctctgaggagagggaagaaggcctgctggggctttccatggccttctgctgtttctcgccaacactacccaggactcttgctacctggttccaactccagacaaccactatgccaggcccggagcctctgaggcatcggccagtccaggccctcatctgaggtaagaatgtacatcagctggcagccccaagcaagtggctgcagggacactgatgccacagctcctgggccggccctcacatctgaaactggttgccgagagccctgagccaaggcaaggatttgccaaaaatgttctgggggcccagcaaatgcaggagccgacctggggctgcacatccctgcccatccccagaaagactgttcctgtcaggatttgtttccctctgctgtggcggtgactgcttctggaccagaacagctccagctcccaggtattttctacaggaccacttgagtgggcagccaagcccaggctcgcagtatcaataaagcagttctctgaggaatgactcctgggctcttgtcaggccaccttgtgcagccccctcatcacgttcaactgcaatgttagacagggacttgattgtctccatggtaactccagctggataagaagcccattgccccagctccccaccaccgccaccaccaccaccacatgcgcactgccaagcagccttccaagagctattgcctcagactcttactccttttttctttccctccaaaccccaatctgggaggccttctgtccctgcctagatctgatgataagggcctctccatcataaggcgctgttcttacccatggtttatctctaagacagaatgctcagttcttgccacccctggagacaactcacccccagctcccagttattgtatgtatctaacccccacagtctggagactccagcacagtagacagttggggggacagaaaggacacacagctgtaccattcacagctacagctctagggcctgccagggcccggagtggcctgggaggctcagcagctagaccctggggatttgtgtgctaggagagcttcagcccctcagggagcagccaggggtcgggggtggggggtccccatcttgcccagctgcccattttcctgtgctgatggcattaacaagaaccatccccaactctgggctgcttctcccatcaatcttttcagtcattttttacaaattttttacttttttctctcctaaaatttctgaacatacagtacaagtatgagctgccttgcaggagaggcagtcttgcagccccagcttcatccagacacatgatgcctatgttcctctgggatgacagagaaaggggaaggaaatgggaggcactccagcatgaggagcaggaattcacacacgggcctccaaatgcccaactgtcccagtgcctgaggtgtcccctgactcagctgagagagttcaacaggtccctaggcccagctcctacatggaggggcaaatccaggcttcccctaggctgggaagagctcatggttggatcctcttgcggtataggtaggcattgctcacctggttcataatgaccaagctggtgaggacagggcataatacagccaggtaccaggctgcaccagtgacagaggcagtgaaccagagtgagcacatgcccagcaagaggctggcactacccagcaggtagcccaccagcccagaagtagcatggtatagcttgagcttcgccaggggccatcggggcagcagcttggggtagagcagccccaccccacctgagcactgcagccctgcccacagcacagccagcagccctgcctgcccatgccgcgtaaccaggtgggctttgccaagctgctctttgtggaggatgacaaggccgaggcccagcagtgcacacagcagggccagcagctgcagcacccagtggcagcgtgctcggcctttccgtgagagggagtgcagcagcgaactctcaggagaaaacaccagtagtgcctcggtcatcaggaaggagaactgaggaaacaggggatgggaagctcaagtgagggtgctgccccagaagaggagaagagggctttatgtaacccttagctgccagtgagtctgggctgattcccctttttctttctctccccactgacaagactatccatttggtggggcaagagtggaaaaccccatctgggatgatatatgtgccctgaataatctccacacttcctcctaggtgccagtctgaaatgtcatctgtcgtatgttaccaagcaaacacagggtttgagatgtggcagttataaatgattcacaagctttgtttccctaacgtggggctggatacaatttcttggcaagagctggccacatgggtgcactgtttcagggaaagttaggtgcatcaccagaaattaaagtaaaaagggacagaggtacatccaaatgcaatgtctcagctttctgcctagaggtgggtgaagcctcattgtgcttagacaaatcttacccatttgacctgggtcctgggtcttcattactctgattcaagtctctttttttttttttttttttttttggagatagtctctctctgtcacccaggctggagtgcagtggcctgatctcggctcactgcaatctccgccttccgggttcaagcaattctcctgcctcaggctcctgagtaactgggattacaggcacctgccaccacacccagctaatttttggttttttggggggtttttttgtttttgggtttttttttttttttgggacagagcctcgctctgtcgcctaggttagaggttagagtgcagtggcgcaatcttggctcactgcaacctccgtctcctgggttcatgcgattctcctgcctcagcctcccgagtagctgggactacaggcgcgtgccaccatgcccggctaattttttgtatttttagtagagacggggtttcaccatgttggccaagatggtctcgatctcctgacctcaggtgatgtgcccgcctcggcctctaagtgctgggattacaggcatgagccaccgtgcccagcctcaagtctgaaatatataccatgggcaggagtagttggagcatgcaactcttccaaacagatattaaatgtggacaaagattcagaggctgccagggccaccaaccatgcccatgctcccacccctaagaactgcccaggcccactacttacagccaaagacataagcaccgggtgccaggagaacaggcctggaatgagaagaggaggcctcatggggctgaggcaagaagaaaccagccataccaatccttaagggttgaggaataccagcagcccatcacccaaggaggtgctgccaaactgtgagccccttcttgctctgcaacaagctgaccccacacctatcctctcttcctggcctcttcctggatcagaggccatgctttgccactcctctggcagtcctccctccttcccttacacctcctgagaggcagccaaatggagcacccagagaaggaaagacaaaccaggaattctgtgtgccctggccatacctacctgctccacctcactcatcgctccagcacagaattccctcaaccagccaggcctgttcccggaagtcccactgcccttcctccccaggaacagtggcccttcccttcccagaagtcagctatgaattctacttactggagccaggcctggcaagcacagccacaaagatggtaaagcccagggccacaaggtgggcggcagcgccagaagcagtacgcagagctcggtagatgtgtgactcggtctccgcagaaagggccatcgtcagccgtgctagtggttgtagcctgaaagcatagtagcgtgggccaggatctcaggtgcccactgttcactcctcactggagaaaaggctgcaaggcaggaatgccaccctcttccaataagttatggtaggaaagaacagtaccaagaccagcaccaggaatggtcacaacatgccagtcgacggccggcggcctgtcaacgtgtacccatgtctgaactggtaccaatcgctggcccgccttccaggtaggaggcgcaaagccatgtaagactacaaatcccagcgtgtaccacgccgtcgccggcagtagagccagctgggagggcgcggagcactatggaaattgtagttccctgctgcggtcccagttacagcgtgaatcccttagcgcaccgcctccccaagtgctgccagcatgctgcccctccacgctagggacttgcctgcctctgccgcagcgcagatctgatgcggtggtttcctccaaagaaagcgggatactccgggccctgccgcgcgcaccgccgctccgtcacggagccgctttacttccgggtgcgacgtctacccacccaggacttcctgggacgagccgtcccccgccccagccacgcctctgagtcgcgctgcgcaggcgccattgggcagagggattggcaagcttgcgtgccccagcgacacaggcctcgaggctgtctctgacaagtgttcacaggaggtggggacgcctctgcgcgaggaacgaggagctacgggcctgggcccggttattgccatgggcagcggctgccgcatcgaatgcatattcttcagcgagttccaccccacgctgggacccaagatcacctatcaggtgccacccgggctcgcgggactgggcgggaagagggacgttctcgagagctcaactggctgcctgaaggcagtagtttcccgtgctgcacgcaggcatgctgcttcattcgcagacaactgtgaggctagaggatagtcagacccaggcccccggctcccaatgtggcagggaagacatacgtcacattggcagtgtttgtaggatatcgggctgtagggatccggttggggggttccaggtcccacagaaggtgagttgggtgacccatgagtatccctgaactgagtgaagagtaaatgatgcataggaagtttaggtaaggcaggagaaagtgttccaggtagagggaacagcatatgcagaagccaggaaggaggtgagatcatagcgtatgtttggaaacagaaagaagtaataggcctgagtggatgggagagaggggaacgctggagaagaggacttgggcttggggggcatgaggaggtcaccatttgtactacacccagtacagatgtccactgaggggcccattgccactcccctccccaggtccctgaagacttcatctcccgagagctgtttgacacagtccaagtgtacatcatcaccaagccagagctgcagaacaagcttatcactgtgtgagaccctagctcggggtgagcggtgggtggcaggggttgtcccaggaggaggaagggacaggcttgggggcctgactgtgttccaattatccagcacagctatggaaaagaagctgatcggctgtcctgtgtgcatcgaacacaagaagtacagccgcaatgctctcctcttcaacctgggcttcgtgtgtgatgcccaggccaagacctgcgccctcgagcccattgttaaaaagctggctggctatctgaccacactagaggtctgcaatgagatgggcttgggtttaccgacaggcagagttggggaaggtgttcccatgtctccaaagtcccccaaacctgggaccctgcaaaccagctcaggactcagggcagccaaccagccaggggtcctgggatgtgcccaccatgctttccatgctctgtctagctagagagcagcttcgtgtccatggaggagagcaagcagaagttggtgcccatcatgaccatcttgctggaggagctaaatgcctcaggccggtgcactctgcccattggtatggccagcctctgcaaggacagcagaggggtagaggagagatgggaaagtgaacccagctagtcagggagaagggcaagactcatgaacacattggtgggcaggaaatagccatgggctgaggtgcccatgtccagggtccaatgcatgatggagctgggactgggggtagggggaaagcagagctctccagctctgccccttgggcaattccttcccctttgtgggcctccgtttctcactccataaaaagagaaagattagccctacccagaggcacctgcttgccccaagggatgctgggaggcctggatggtaattgaggacctcttggaagaagtggcactgaggatatggatggggccccctgcagatgagtccaacaccatccacttgaaggtgattgagcagcggccagaccctccggtggcccaggagtatgatgtacctgtctttaccaaagacaaggaggatttcttcaactcacagtgggacctcactacacaacaagtatgccatccctccctgggtatcatcacctggggctggccacagccctggcctcatcctgtttcttctgaccttgtcccactctgcccagatcctgccctacattgatgggttccgccacatccagaagatttcagcagaggcagatgtggagctcaacctggtgcgcattgctatccagaacctgctgtgagtgggcctacagtcatacctgggacaaggtcaccagccagggaagacctcaggggccctgggtgtgagggttgggaaggcatggtcctcagaagctgagcacagctctctctctcaggtactacggcgttgtgacactggtgtccatcctccaggtaggtgagttgggtttggttaagtggagagtggatcatgtggctggaccagaccagggctgtgtcagcttcccaagcccctcactcaggcccctatgccttctgctaccctctagtactccaatgtatactgcccaacgcccaaggtccaggacctggtagatgacaagtccctgcaagaggcatgtctatcctacgtgaccaagcaaggtagtggtgggttctgggggaagccatcttggggagggcagggccacatgatgagctgatccctggcacccacagggcacaagagggccagtctccgggatgtgttccagctatactgcagcctgagccctggcactaccgtgcgagacctcattggccgccacccccagcagctgcagcatgttgatgaacggtcagaggagaatttgctggggcatttgggagttacctgagggaagctagaccctttatgtctctcaggagccctggatcatggggcactgccaatccaagcaggcttcctggagatgatgggctacagagacaaaattgaagggagactacaggaaagggttggcctgcctgaaagaaggcctggccagggcgtcaccccgtcctctgatcctcaccctaggaagctgatccagttcgggcttatgaagaacctcatcaggcgactacagaagtatcctgtgcgggtgactcgggaagagcagagccaccctgcccggctttatacaggctgccacagctatgacgagatctgctgcaagacaggtggaggcaggcgggcagtcagggtgggttcagggcagggtggccaggccaaggccactgacctctcctccaccaccccacccaggcatgagctaccatgagctggatgagcggcttgaaaatgaccccaacatcatcatctgctggaagtgaggctggtagtgactggatggacacattgctgtgggtagtccctcctactaggaggcttgtcatactgtctagaggttgactcttagttctgtaaataaagacatccatttcaaacagcctttattgagtgctgtttctgggccagccgtgggagacccagcagtgaatgaaatagccacgagccgtgggctagatcgccatctggtgggcaggaccgacaatcgacaaataaaagtgccggttaattacaaaaaaaaaaaaaaaaaaaaaaaaaaatcgtcctgatgcggtgactcacctgtagccccagctactcaggaggctgaagtggggggatcatttgaggccacgagttggaggctacatttagctgtgatcccatcactgcaccccagcctgggtgacagagcaagaccccatctcaataataataataataataaataaacctagaaagaagcagatgtagccaggcgcggtggctcatgcctataatcccagcactttgggaggctgaagcgggcagatcacctgaggtcagatgttcaaaaacagcctggccaacatagtgaaaccccatctccactaaaaaaaaatacaaaaaattagccaggtgtggtggtgcacacctgtaatcccagctactcaggaagctgaggcaggagaatcacttgaacctgggaggcagaggttgcagtgagccaagatcatgccactgcactccagcctaggtgacaggagactcaatttcaaaaaaagatgtgatcaagagtgagttgggttggaggcagggactgctctggattaaatggccaagaaaggccatgctgaggtgtaaactgagccctgaaggaaaagtattccaggcaaagtgcaaaactctgaggcaaaaacctctttggaatgtatgagggaggttcagggaagcaaggaggagaggaaagaatccaagtcccgaggtacaggagaggacaagaagtagatcttgcagagctgctagtaagcggcatcccacctaacattttgagggccagaagtagccacagagcccctctcacgcaagggagtaatgtctatatgctttttttttttttttgagacggtctccctttgttgtccaggctggagtgcggtggtgcaatcttgcctcactgcaaactccacctcctgtgctcaagcgattctcctgcctcagtctcccatgtagctgggactacaggtgtgtgctaccacacctgtctaatttttgtacttttagtagagacagggtttcaccatgttgcccaggctggtctcaaactcctgacctcaagtgatccgcctgcctcggcctcccaaagtgctgagattacaggtgtcagccaccgcgcccggcctgatatacacttttaaggctccgggctgtccatgaggatcaagcgtggaagtaggtctacagaaaaggctgccgcagttcacccatgacaggtgatgacagtctggacatagggaggatggagagaagtcgtgcgccctggcagtatttcaggagccaactagtggagccgggacgcgagaaatagaggaaccaagaagccataaggaggaggaagagcagcgggtaggtcaagatgccacagccgcaggaggggctgttggggtcggggttacccccatccctgtgcaggcggacttggcgtctgaggacagagtccagaccacaaggatctggagctcaggagagactcgtgggccacagcccgagaaagcgctgggaatccaaatactatggcgattggcagtcgcgtaggcgaggcgggctagagacccgcccggatttaggcgcgagccacctccaggggcggggcccaggccgcactgcgcaggcgcggctaacccgtttccatggctgcgagaactgacgctccccaaccgtcccgcaactgtcctgtcccagactttggcaccgtcggggtccgtcgtccccgaatgtgacagcatccccaccccggctgctgcccaggatccgccggaccccggcctcgatatgggagacctggaactgctgctgcccggggaagctgaagtgctggtgcggggtctgcgcagcttcccgctacgcgagatgggctccgaagggtgaggcacccgggtcaggcggagtcccggagtcattgtccttgagtcggggagctggggcctgactcgggggaggggctgcccagtgtggaggggctcccaaatgggggagcagagcgttccgagacaggagtattactgctcctgagccccctgtgtcccctcaggatcaggttaggcttcagtaggatccagcccccatccccactcctaatgcacacacgtggacgcacatgcacttaccctctgaggcaggtggaaccagcagcatgagaacctggagaagctgaacatgcaagccatcctcgatgccacagtcagccagggcgagcccattcaggagctgctggtcacccatgggaaggtaccccgaggtcacaggcagggttcctgccttcccccatacctcacctactctacccctccggagtcccctgtgtgcccttcccctctggcctggtacacctgttctccctgaaggacaaagaggaatgtgttacatgtttcattttgtatccctattggacaggactctggcacaccaggctgggtgcagggcatgagttgattagggagaaagctgtaggtcctagaacagcttaggcttcaaggggaaggcccaaatgctaaaggcatctgtgaattgactgtaaggctggtggtggggaaggggtggggaggggttggggagggcgggagggaggggagataacctaactggaggtggaacttcggcatggaaggaagcagccttcccaacatgaaagggggaagttagaaaccagggagatgcctggctggaacatggaccagggagtgtcaccagcagatgacctgagatatcaattgaccaaaaaaaaaaaaaaaaaagccgggcatggtagctcatgcctgttatcccagcattttgggaggccaagacgggtggatcatctgaggtcaggagttcaaggccagcctggccaacatggtgaaaccccacctctactaaaaatacaaaaatttgcagagcatggtggtgcacacctgtaatcccagctactcgggaggctgaggcaggagaatcgcttgaacctgggaggcagaggttacagagagccaagatcatgccactgcactccagcctgggtgacaagagtgaaactccgtctcaaaaaaaaaaaaaaaaaaaagaaaggtcctttgcaaaagaaagatggaactcatactaggggataggataggaacagggcactgtgaagggtcctgagtaggagtgaggccaaggcacacaagagctttggaggaccacagacagggactagagggagggcatgaggagaagggctggcttgaaagggatgcctgaatgggcgggcagaggataagggtgcaggtgcaggcagggcaaggcagtctgggaactgggcaggagccagtcacataagcatgagggacatccacagaggtgttgggagcagctggtaatgaaggtccaaggtgcaagagagaagtcaggaaggatactcatgggtctggaatagtttaggggcccagcagtgtttggggatatcagggttgagctgagccggggatgggagggttgccaggcaaaggtaggcccatctcatccctgtcctttaccctacccttcaaaggtcccaacactggtggaggagctgatcgcagtggagatgtggaagcagaaggtgttccctgtgttctgcagggtggaggacttcaagccccagaacaccttccccatctacatggtggtgagctgggcccctggttcatacctcttctcactccttcagagggctctggaccggggaggagagctggtagcccctatcccttcctcaggccctgtccttctctttatctgacaggtgcaccacgaggcctccatcatcaacctcttggagacagtgttcttccacaaggtgagggactatctctgcccatgggccacagttccgggtcagggcctggcaggaagggagattgtgtctgtgtggggaaggcatcagacacagaaagtttccctcctccttttcccaggaggtgtgtgagtcagcagaagacactgtcttggacttggtagactattgccaccgcaaactgaccctgctggtggcccagagtggctgtggtggcccccctgagggggagggatcccaggacagcaaccccatgcaggtgggttgaggttacctagggttgtgaaagcctaggtctgggttccccaaggcctgcgcaggtgagggtggcccagcgtgaacactgtgtgacctcccaggagctgcagaagcaggcagagctgatggaatttgagattgcactgaaggccctctcagtactacgctacatcacagactgtgtggacaggtgagcagtccgactgggcctgggcctactgtggagggctggaagaccgggcctgtagcctgcctctactcacctccttcacaacgtccctgcccctagcctctctctcagcaccttgagccgtatgcttagcacacacaacctgccctgcctcctggtggaactgctggagcatagtccctggagccggcgggaaggaggtagggtcctcccccaccagcctaagccccaggctactgcttcagggtatctttttgatagaggggggcagcttgcacacacgaagacaaaccctgtccccaagcccactgaggataccaggatgcctcagccaaggttggcctagacctgagctctgcagcaggccaggcccatgtgtccactactgaggctcaccctgctctggggtcagcagccctatagcctgggcaagtcctgcagcccaggttctcccattcccaggcagtggtcagtctcccagcccccacagctggctcacttgaagagaattcaacgtctgcacccagtgtgctggttcctctccccaggcaagctgcagcagttcgagggcagccgttggcatactgtggccccctcagagcagcaaaagctgagcaagttggacgggcaagtgtggatcgccctgtacaacctgctgctaagccctgaggctcaggcgcgctactgcctcacaagttttgccaagggacggctactcaaggtcagactccctccgcaccagcccccacagccccagtaccgccctccccatcctaccccgactgcgtccctgctgtttatctttgcccacccacctcaaccccagtgctcttttcagtccttgggcctcaggtgacacaccagctagtgggacatgggcccccacaggcattctcagcccaacccagccccttccttttccttggccccctggccagcacctgcatcacactggcctccactggacacccttgcagcttcgggccttcctcacagacacactgctggaccagctgcccaacctggcccacttgcagagtttcctggcccatctgaccctaactgaaacccagcctcctaagaaggacctggtgttggaacaggtaggcactggaaagttagctgctcaggaccactgtcccactttaccagcaccttcctgccactctccacttctctctcctagatcccagaaatctgggagcggctggagcgagaaaacagaggcaagtggcaggcaattgccaagcaccagctccagcatgtgttcagcccctcagagcaggacctgcggctgcaggcgcgaaggtaaggcctgtggaaatggcagggagggtggaggggatgcaggaggcatggatgtgggtggggtgcccccaccttccagggccagtcagaccttcctgactttcccccaggtgggctgagacctacaggctggatgtgctagaggcagtggctccagagcggccccgctgtgcttactgcagtgcagaggcttctaagcgctgctcacgatgccagaatgagtggtattgctgcaggtgagggtatcctagaaccttggacctctaagccctactcccacatcccccacatgcattgccatcctcaatacccacctgcctgcagggagtgccaagtcaagcactgggaaaagcatggaaagacttgtgtcctggcagcccagggtgacagagccaaatgagggctgcagttgctgagggccgaccacccatgccaagggaatccacccagaatgcacccctgaacctcaagatcacggtccagcctctgccggagccccagtctccgcagtggagagcagagcgggcggtaaagctgctgaccgatctccctcctcctcaccccaagtgaaggctcgagacttcctgccccacccagtgggtaggccaagtgtgttgcttcagcaaaccggaccaggagggccagggccggatgtggggaccctcttcctctagcacagtaaagctggcctccagaaacacgggtatctccgcgtggtgctttgcggtcgccgtcgttgtggccgtccggggtggggtgtgaggaggggacgaaggagggaaggaagggcaaggcggggggggctctgcgagagcgcgcccagccccgccttcgggccccacagtccctgcacccaggtttccattgcgcggctctcctcagctccttcccgccgcccagtctggatcctgggggaggcgctgaagtcggggcccgccctgtggccccgcccggcccgcgcttgctagcgcccaaagccagcgaagcacgggcccaaccgggccatgtcgggggagcctgagctcattgagctgcgggagctggcacccgctgggcgcgctgggaagggccgcacccggctggagcgtgccaacgcgctgcgcatcgcgcggggcaccgcgtgcaaccccacacggcagctggtccctggccgtggccaccgcttccagcccgcggggcccgccacgcacacgtggtgcgacctctgtggcgacttcatctggggcgtcgtgcgcaaaggcctgcagtgcgcgcgtgagtagtggccccgcgcgcctacgagagcggaaggggcagccaaggggcagcgcagtcgccgcgggtcaagtcgcggcagagggggtcggcggggacagctcccgaggactaggtccgttactttcgccccatcgctgaagagtgcgcgaaaatggtttatcccttgtcgcactccactcgtatctgggccacagatgagcagaggtggctgcttatatgtaaaaatacgctgattttaagtttcttatctttaaaatgccttggcccttcttgagaaagggtttgtgcctactgtcctcggagtccatcttcccaggcttgcctcttctcaaacactcatgaccccctccagaacctttagggtgaagggaaattaccacctatgggagggagcctggaaaaatttagaacctttggtgggccccctgcaagcaggagttttgttgagtctttatttagcaaacacccttttctgacccagtgaatcagatgctaaaatatgcacgcagccacacacccagcagtccttctgcacccctgggaatcgccagcaagcaaaggttgctctcccctgggtagacaccagctggaatcaccaggggtgcttttacagtcctccccgctagcctggatcccaccgcagacctgttgaatcaactgctgggagtggaccctaggcatcagtaaattttaaaaactccccaaattattgtaacatggagtctgggttgagcatcactgctctggcctatttaggaacttgtggatggatagtgtcccaggtctgtgtgtgcatggagaccctctcatccggtacaagaggacatcacaaattcagctggggggagcacaaagttgtgacagaatgcaaagaatgaacaaggggccgagcgcggtggctcatgcctgtaatcccagcacttcggaaggcggaggcgggtggatcacctgaggtcaggagttcaagaccagcctggccaacatggtgaaacctcatgtctactaaaaaataaaaaaaaatgagccaggcgtagtggcgggtgcctgtaatcccagctactcgggaggctgaggtgggagaattgcttgaacacaggaggcggaggttgcagtgagccgagatcgtgccactgccctccagccttggcgacagagtgagactctgtctcaaaaaaaaaaaaaaaaaaaaaaagaacaaggctgggacattgcagcgttctcaaagagaaataaagtagccatggagataagaagcaggatgatttgggcatgtttatcagaggtagagacaagggagaaatcaaagataagtttgggcttttgtctccagtaactgggagcctagtggccatttttgctgcaaagaggaagctgggcaagtgtagcagtgaggctgaagaaaagggaattaaattttggccatgttcacttgaaacgtcttttagacatcctagtgaaggtactggcacggaggatctagtctgagggtttaggtcagtgtttcagccgtggatctggggcagatgaatgtagacagaccaggccagtgatcaggactgagcccagacttcatcgtgagatatggaagttgagtcagaatctgcaaaggagctgagcaggagctgcagggggtaggaggaaaactgggagagtgtagcccctgggagtcaaagggagcaagcttcaaatgatgctgagggggtgagaatggagaatggaacactggattccatttggtagtacacagatcgctgaggaccctgtcccgggcagtttcctggaggaagaggcaagcctggctggagtgggtagaggggagagtgaaggcgaaggattagagtgtatagagaccagtgtcttggtctgaggggagtagagacaggtgacaaccacagggcagacgtaggttaaaggtgtttagtttttccttcaagtaaatgggcagatgtattccatatacgttcccagtgaagggccgggtgcggtggctcaagcctgtagtcccagcactttggaaggccgaggcgggtggatcacctgagatcaggagtttgagaccagcctggctaacatggtgaaaccccgtctctactaaaaatacaaaaattagctgggcatggtggcgggcgcctgtaatcctaggtactcaggaggctgaggcagaagaatcgcttgaacccaggaggcggaggttgcggtgagccgaaatcgcgccattgcactccagcctgggtgacaaaagcaagacgcagttttttgttgttgtttttttaattgccaatgaggaaaggggaagttctgtgctaggcgatagagatccaactgttgagcaggcctctctgcctgtggccttccggccggtttccagacgcccaggtggccaacattagagtccgcgtagcagtgtgaggtaacccactgagataggtcgggcctgcggagcctggcgagcagcggccctctccctggggcttcccttcaatctccgggacatttccccgacctggagctcctccgcctcaccgccaggcctctctgcagattgcaagttcacctgccactaccgctgccgcgcgctcgtctgcctggactgttgcgggccccgggacctgggctgggaacccgcggtggagcgggacacgaacgtggtgagcgcggggccgagggcgtatgggaagggcgaggatgggcaggccacagtgcaggcattctcgagggctgcctgggtgccgcgcgcaaggagcgttctaattgccgatttcccggcggcacagagaggctaattctgcgcgggggctgggaggggagcctggattgccggctccgcaagtactccacccgctgcaagcggacccgggcccaggctgacccaggctccgcgcacgcgcacttcccgcaccttcccgccctcgcctccggccagaggccactcttgtgcgcttgcccggacgctggcacccgcccccgttccctgtggtaggtggggtctgtgagtggagctccggagcgatgaggtcattcctgggggcgaagcgtgcgtgtccccgccccggcgttcctgccccaatgagacaagagctagatcccggcgatctacgtttcagtcttaacggttgcggcgcggctctggcccgggcgcacgcgcacactgacacgcgtacacgcacgcacgcgaccggggcggtggttggcggctacggacgcgcaggactgggggacgggcgggtacggctatgggcgaggcggaggcgccttctttcgaaatgacctggagcagcacgacgagcagtggctactgcagccaagaggactcggactcggagctcgagcagtacttcaccgcgcgaacctcgctagctcgcaggccgcgccgggaccaggtgggagccagggggtgccggcgggcgggaggggaagcggtcgctggagctccgccctccccggtccgttgccgcgtcctgggtcggtgggcagccccaccctcctggctacgtggctccccgcgggtcctggccggggacctgcccgcggaaccgtgcgtaagaccccgattccaccgcctagatgctgggtgccggggcccccttggtttctgtcacagacaggttgaacacggaaaaagcagctgtatggcttgtggtagacctgagccgggcattatccagctatgactaaagccgaccgagcagtttggactagcacctcgatttccgcgttcgaatgctcctgctccctccttggggagactaggggaggatgtggagagggaagagtcctcgccaggaattgagaagtatgtttaggaaaacttgagaggcagagagagatcctgctcctccatctgcactcctgtatggagccagctgagccctcacctcttccctgttctggcctgtcaccagctgctggaatgtggaagattctgttcccttcctctagggtggatctggagaaagatttgggaatagataggaaagaagtcttgttttggaccataagcattcaggagcactttacccacaggaagggggaaagctagattataaaatgcctaaagaggtggaaaaagagatccaggttactaacccaggactgtaaggtgtctcggaacctcctaggtatccccattatcggagaactgtgtgccagatgccattggtgtgaccaccaggctcagagaaccaggcctaggcaccaggaaaaagaaacagggactgtgaagctcagtatgcctggcagaaatggggcggaaatccttatttaagtaaagaaagtggagttgtgagtgatgcttcagataaaattttacaaaattccttacaaaatgggtggtgctcagcacgccaaaatcttagcccagagcttgggtgcaagggttgagttgagtgtagacccctgggcttgtcttcatgtcagtcagtcctgagccattttccactgtggaaaggtgggaaaaccacaagacactaaccaattgaaaaggagggctagccacggaggtgcacacctgtaatcccagctacttgggagggtgaggcagaaggatcacttgaacctgggaggcagaggttgcagtgagccaagatcgtgccactgcactccagcctgagtgacagagtgagactctgtctcaaaaatagaaaaggaagccaagtacggtggctcacacctctaatgccaatgctttgggaggccaaggcaggtggatcatttgcaatcaggaattcgaggtcagcctggccaacatggtgaaaccctatctctactaaacatacaaaaattagccgggcatggtggtgtgtgactgtagtcccagctacttgggagactgaatcacttcaaccgggaggcaaaggttgcagtgagccaagatcgtgccactgcactccaacctgggtgacagggtgaggctctgtctcaaaaaaaagaaagaaggctgggcttggtgactcatgcctgtaatctcagcattttgggaggccaaggcaggcagatcacttgaggccaagagttcgagacctgccaggccaacatagcaaaaccccgtctgtactgaaaatacaaaaaaattatctggccatggtggtgtgtgcctgtaatcccagctactggggaggctgaggcaggagtatcacttgaacccagaagacagaggttgcagtgagtcgagactgggccactgcattccagcctggatgagagagcaagactctgtctcaaaaaaaaaaaaaaaaaaaaagaaagaataggaggctgagaagtcccaagttatatgttaaaaaaaaagaaaaaaacatcagttttaggccaggtgcagtggctcacacctttaatcccagcactttggaaagccgaggtgggtggatcatgaggtcaggagttcaagaccagcctggccaaaatggtgaaaccccgtctcgactaaaaatacaaaaaattagccagttgtggtggcaggcacctgtaatcccagctacttgggaggctgaagcagagaattgcttgaacccaggaggcagagattgcaatgagccaagatcgcaccactgcactccagcctggaaaacagagcgagactctgtctcaaaaaaaaaaccatcagtttttatggacagtggtagagtggagggtgggtccctatggtgcagaagggaaattccatggtcctgctgtgcatccgactgggatggctgttgaaatcctcttccagcaggcagctttggaaacagaaaaagaaactcttcctcctttagaatcctggaagggctgtgcagtgcctctaatccaagtctgttttctgagtgaagatagggaggttcatcaccagaagggaaggggctggaaatgaggtcactgcatcccagcccagggctcctgggtcatccaggaagggaagaaggagcaagctttctcattgttaggtaggagctcagagccatcacaagaacaagttagcaccatccctgtgccctccctgttctgcaaacaaaatgatcttccttcttgccctggcactagagtctgtctggcatttctcctgcccctagtactcctcccatctgggtacttcttcccgttggtgtactgaacaaacacatccactgctttattcacagcctccagccctcattttccagggcccacaccatttgtttttactaacccgacaaggttgcccactgtccccagtaaggtttgtactggggtttttactccagtgctcttctccatccaggagacctttggatacttggggaagaaaatgagcttaaattcccacccctccccctttacctttttcctgtaaggccctggccttagttcttagccccacatccttgctggctgcagaatagcagcgggttctgggtaaggagcattctgctaaaacgctccaccctgctccctcatctgtcctctccatttgtccccatcagatggtttaagtgcttaaggggactccagggcggagtcagggagaaccctggctctcctgggctaggcacaagatcattctacaggaaaccttgtgggaattcttctgggacaaagtattggtcagcgctgagcttagctgtgtctgtgacactcgcattctaactagggcctatctgacgtcaacaggaagtaaggctgatgcagtggggccaagggagtctgggagaagaaagtcggttcagagccctggctgccctgtcccacactccacccttccggcaagaatccagtccctagatgaggtggggagtgagtggtcgagttaaaaatctctgggtcgggtacgatggttcacgcctgtaatcccagcactttgggaggtgaaggcaggcggatcacttgaggtcaggagttcaagaccaacctggccaatgtggtgaaatcccatctctactaaaaatacaaaaattagccgggtgttgttgtggcacgcgcctgtagtcccagctactcgggagtctgaggcaggagaatcgcttgaacccaggaggcagaacttgcagtgagccaagatccagccactgcactacagcctgggcgacagagtgaggcttcgtctcaaaaaaaaaaaaaatctttgggccaaatctccagacagcacaggcaggtgcagaaacccaccaggaagctgcctgtgtacctctggcagattggagcctggcctaaagctgccttttatgcagcttgggtcaaggttaaacatcatgtcacagtgatttttctcactatgtgtgagacatggagaactggctccaagtactactctgtccactggtggctggactactgatgtgcaccactctccactcctctcaccctgcagtgggtcatggccccgtgccggggcagaggagaaaaatgggctgccttctccaggacaaaccctcactccaactcaactagggtgctgtgatcagaatgtgcaattgaggtgtgattttactgattttttttttttttgagaccgagtttcgctcttgttgcccaggctggagtgcgatggcacgatctcagttcactgcaacctccacctcccgagtttgagcaattctcctgcctcagcctcctaagtagctgggattacaggcatgtgccaccacgcctggctaattttgtatttttagtagagacggggtttctccatgttggtcaggctggtctcaaactcctgacctcaggtgatccacccgcctcggcctcccaaagtgctagaattacaggcgtgagccaacgtgcccagcctgtttttgttttttgtgttttgaagcagggtctcactcagttccccaggctggagtgcagtgacacgataatagcttactgtagctgcaatctcccgggctcaaacgatcctcccacctcagcctcctgaacagttgggactacaggcacaccaccacacctggctaatttttttttttctttttttagtagagatgaggtcttgctatgttgcccaagctggtctcaaactcctgaggatcaagtgatcctcctaccttagcctcccaaaatgctgggattgcagatgtgagccaccacacccagcctgattttactttaaatgagagtccctcttcagagtccctcagctgttcctggcccctggccatgtgccttcagttgcccctgcttctgtggtatccttaaggctacattcagtgctgaggccctaggcaggcagcagagagaagccaaatgattctgtctttcccttatccacccagagcatgcaaaaccaggagcagtggtgggttcagggtgggcaccagctatgtatatgtacatcagggacagggggccaaaggcagtcagtttccaaagactgccccagaggccatttttcagagaagccctgggttcctcaagggccctgtgtccatgctggcccatcttgcaggacgagcctgtggagtgggagacacctgacctttctcaagctgagattgagcagaagatcaaggagtacaatgcccagatcaacagcaacctcttcatgagcttggtgagttgactgctcaggaagggggcgtggggaggagcaggtacccagctatgtgcctgatactcagagggtcacaactgaggttatcttgggtgggcgcaagcagtaatttgtgcatacccagcctagccccaagtagactgacatctcacctggaacctattatcaaggtttggtttctctatttctttagaacaaggacggttcttacacaggcttcatcaaggttcagctgaagctggtgcgccctgtctctgtgccctccagcaagaagccaccctccttgcaggatgcccggcggggcccaggacggggcacaagtgtcaggcgccgcacttccttttacctgcccaaggatgctgtcaagcacctgcatgtgctgtcacgcacaagggcacgtgaagtcattgaggccctgctgcgaaagttcttggtggtggatgacccccgcaagtttgcactctttgagcgcgctgagcgtcacggccaaggtgggcttcccaccccaccctgccctatgtgagggtatatacgcatgcacctgagcatgcaggggctgagcagctggccctgtctctgatcattacttccccttcacagtgtacttgcggaagctgttggatgatgagcagcccctgcggctgcggctcctggcagggcccagtgacaaggccctgagctttgtcctgaaggaaaatgactctggggaggtgaacgtgagtacatagttcttagtttcttggttgtcactagacaggactgatgggctgtagctacagtaaggcttggaggaggaattgtgctggaagacaagccctgcaaaacagttccaggagtgtataggcattgtaactaaagcaaaggcttccagaccactcatgccaaagcctagggttgtcccaagaagccaggaagaattgccttggtgctttgatctttcctggtgtggaaaatcttctggagatgcaggagtccatctaatgacatgaggaggcccccttcagactttttacctggaagctttctggctccaaggtattaggcctgtggagtgaaattagactcagaatatgcctgacctgtccacaggtaattggggaacatctgacttggttgtctcagtaaggtgaccgttttgtagggcccatcttccatacaaactgctgtcagggatcctaccagagatcattcagccaagagcctgacatcagaaagcccagtcctagcttgtgtgaacatgaggtgctagtcttctctggggagggtctgctggcttggccatcccttctgcagcctgtacactccccttttgccccttgcagtgggacgccttcagcatgcctgaactacataacttcctacgtatcctgcagcgggaggaggaggagcacctccgccagatc

SEQ ID NO: 701 - DNA, 138839 bp, Homo sapiens
aagcttgcactgtttgagagcacaagagtggagaggtgggcaccttaattggcagtagagggttggggagagactgtcaaagaaaaccttagggagtttccaaagataagttaggagttaggtacgcaaagttgggtgggaaccagggataaaaagtatcatgcagttcattcatataatactctttggagagctggccatgcctcaggcaccagtgatacagcagtgaataataataatagctaattttttttttgagacggagtttctctctgttgcccaggctggagtgcagtggcatgatctcagctcactgcaacctctgcctcccaggttcaagcgatcctcttgcctcagcccccctagtagctgggattacaggcacgtgccaccatgcccagctaatttttgtatttttagtagagacggggtttcaccatgttggccaggctagtcgtgaactccttacctcaggtgatctgcctgccttggcctcccaaagttctgggattaccggcgtgagccaccaggcctggccacaataacagctaatttttttttttggagacagggtctcactttatcgcccaggttggagtgcagtggcacgatcttggctcactgcaacctccacctcccatgttcaagcaattcttgtgcttcagcctcccgagtagctgggattacaggcatgtgccaccacgcctggctaattttgtatttttagtagagaccgggtttctccatgttggccaggctggtctcaaactcccaacctcaggtgatccacccgccttggcctcccaaagtgctgggattacaggcgtgagccaccacacccggctaataatagctaatttttattgagcacctcctgtgtgccaggcactgcgctaagccttttataggaactgtttcatttaacctcaccacagtcctgtcaagtatgtgctcttaaaatcatccctattgtactgataaagttaaataatttgcccagggttgcacagctcttactttgtagagttagaatttaaacccaggtagctgactgcagagcccttgtctaaatgaaaaaggcaaccaggtaggtttctgcttcatagatggcatcttttgtgggggaaattcccactgaatatggaaacagggtaatctcaaatagtgaaaagtgcaatgaagataaaaacatatatgtcataaagatggaacagatcccgtatgtgtgtgcacactgcctgagatagaggattaggggtgacctttctatggacataacaggcctgaatgatgacaagaactcagccatgctaagagctggggtgagagcctgtcagggagaaagaatggcaagagcagtgacactgagttgggactgagtttggccagagtgatggagagtggaaggaaggccactgtgcgccagccttcaattgctacaagatgcatcagagagattggcaggaactggacatgtgattctgtccaaaactgcaacacaatagccaacagacctctaaggctacaaatgtaggcattcatagttacagggatttttgttcctgttgctggttttgggaacatggttttgacctttttttttttttaattgttttttggatatgtaatctgaattatatcttctttgtatgctatcaggttcctggaaggtgacgtgaaagatcactgtgcagcagcaatcttgacttctggaacaattgccatttgggacttacttctcggtcagtgtactgccctcctcccacctgtctctgaccaacattggtcttttgtgaaatggtcgggtacagactctcatttgctggctggacaaaaagatggaaatatatttgtataccactattcataagttagggtaaagtgaaaacacaattttctggatatattgggcctcttagtattttttggagttttaaatataaaggagaatatctgaatgacacttaaaatgattgcttgtttatgtccagacagacttattttttattctaatgatggtagcaccactgatcttggatgtacatttatgtatactttgagaaaaagggttttaggttgatttttgtaatttcccacatttgtacatgtgcttttaaaggtgtacataaagcttcaaatggcaataaatatttatttttatacattctgcttggcatgttattgtttcccattctttcaagatcatttgcagaagcaagaactaattattatacaaccaggatatttaatcaatagtctttgcctagtaagtgtaaatttcagttcagttaacttactacactaatatgcaatatactttttgtgctatttgtaatactttatttttacatacatactaaaataaaatgaaacctactaaaatatcctaatttagggatactcttactctttttcattctcatgcatctttcatgccagtgctgcattatcactagagtcacctttttttgagatggagcctcactggtcacccaggcgggagtgcagtggcatgatctcggctcattgcaacctctgcctcccaggttaagtgattcccctgcttcagcctctcaagtagctgggattacaggcacccaccaccacacctggctaatttttgtattttaatagagatgggggtctcaccatgttggtcaggcaggccttgaactcctgacctcaagtgatccacctgctttgacctcccaaagtgctgggattacaggcatgaaccactgccgctcttttttttcttggttttttgttttttgttttttttttagaacggagtctccctctatcacccaggctagagtgcagtggggtgatctgggctcactgcaacctccgcctcccaggttcaagtgattctcatgcctcagcctcctgagtagctgggattacaggcatgctctactatacccggctaatttttatattgtttgtagagacagggtttcactgtgttggccaggctagtctggaactcctgaccttaggtgatctgcctacgtcggcctcccaaagtactgggattacagggatgagctaccgtgcccagccaaagaagattatattttttaaagacaaatttttgggccgggcgcagtggatcacgcctgtaatcccagcactttgggaggccaaggtgggcagatcactaggtaaggagatcaagaccatcctggctaacacagtgaaaccccatctctactaaaaatacacaaaattagccgcgcatggtggcacacgcctgtagtcccagctactcgggaggctgaggcaggagaatcacttgaacccgggaggcggaggttgcagtgagctgagatcacaccactgcgttccagcctggacagagcaagactctgtctcagaaaaaaaaaaaagacacatttttggccaggtgcagtgctataatcccagcactttgggaagctgaggcgggtggatcacaagaggtgggtggatcacacacacaaaaaaagatacatttttatcatactgtagtttttgctcatttacaaattctggtatttttttaattttctttttcaaaggatgtctattatattttctttgagacagtctcactctgttgcacaggctggagtacagtggtatcacagctcactgcagtctcaacctccccacactcaggcgatcctccaacctcagcctccccagtagctaggactaaggtatgggctaccatatccagctaattaaaaaaaaattttttgtgagacagagtctcaccatgttgcccaggctggtctcgaactcctgggctcaagccatctacccactgtggcatcccctcccaaaatgctaagattacaggtgtaagcctccacacccagcctcttttacaaattctatacccacaatttttaacctcaaattatttgctagtgtatcatagacactggagaactttttgtaaagatttaatttactcatgaaccttgagaaacctgtattattatcttgataataacaagagtcaacaaaactaaggcacaaagtaattctagtcagtaatggttgcacaaactgagcatctgcttgacacagtaggtatgtaaatcattgctgtgagacctctgccattgagaagtacacagtctagtgggagagactgtcgcataaagcagtcaggactgtactttaaatttaaggggtatgtttcagacccggcacggtggcacacacctataatcccagcactttggaggccgaggtgggcagatcatttgaggttaggagtttgagaccggcctggccaacatggtgaaacattgtctcttaaatacaaaaagtagctgggtgtggtagcacacacctgtaatcccagctactcgagagactgaggcaggagaatcgcttgaacctgggaggcagacattgcagtgagcagagattgcaccactgcactccagcctgggcaacagagcgagactctaattaaaaaaaaaggaagctaaaaaaaaaaaaatttaagggatatgttccaggtgctattatggaagctcaaggctgagcagtttggacaacccaggagtcccagaaaaacttcatgggagatggcaatttagctgagccttgcgggataagtaggtcaaagcagaagcaacggatattctgggcagaaaggacagcctggccaaaatggtgaaacccagtctctactaaaaatacaaaaattagccgggagtggtggcaggcgcctatagtctcagctactcgggaggttgaggcagagaatcgcttgaacccaggaggcagaggttgcagtgagccaagatcgcaccattgcactccagcctgggcgacagagcgagactctgtctcaaacaatgacaaaaagaaaaagtgtaactgtaggggtgggttgcccctccacacctgtgggtgtttctcgtaaggtggaatgagagacttaggaaagaaaaagacacagagacaaagtatagagaaagaaataaggggacccggggaaccagcgttcagcatatggaggatcccgccagcctctgagttcccttagtatttatttatcattcatgggtgtttctcgaagagggggatgtgtcagggtcacaagacaattgtggggagagggtcagcagacaaacacgtgaacaaaggtctttgcatcatagacaatgtaaaggattaagtgctgtgcttttagatatgcatacacataaacatctcaatgctttacaaagcagtattgctgcccgcaggtcccacctccagccctaaggcggtttttccctatctcagtagatggagcatacaatcgggttttataccgagacattccattgcccagggacaggcaggagacagatgccttcctcttgtctcaactgcaagaggcattccttcctcttttactaatcctcctcagcacagaccctttacgggtgtcgggctgggggacggtcaggtctttcccttcccacgaggccatatttcagactatcacatggggagaaaccttggacaatacctggctttcctaggcagaggtccctgtggccttccgcagtttttgtgtccctgggtacttgagattagggagtagtgatgactcttaaggagcatgctgccttcaagcatctgtttaacaaagcacatcttgcaccgcccttaatccattcaactctgagttgacacagcacatgtttcagagagcacggggttgggggtaaggtcacagaatctcaaggcagaagaatttttcttagtacataacaaaatggagtctcctatgtctacttctttctacacagacacagtaacaatctgatctctcttgcttttccccacatgtaacagcttgtctatgaaaggtaggaggaatggtattagagatctataaagggtcagcggagggtcctcttactttgtttttaggctaagaggaactttgatgtgtttatgggttcaggagaaagagccagaagagagacctttgagatgtagggaagaagagctaactggtggtataaggtcccattgggaataagaggggatgagactaccgtgcaaatgggctggcagagggagcgatcatggtgggttggtgggatagtttgtgctgggaagctgacagcttttatgcttatccatcctttgatgggaatgttactgaaaagcaccggtgttgtcttttaactcttcctcatctgctaaggatgtgatcttaatattgggacttttaccctacaggccatgtaggctgatattttgtctttatttgtttgctgaagggaaaagtagctctcccaaattatttaaataagagatgatttgttatgttttaccaaaaggattaaatgtaacactgaggccgggtgcagtggctcacgcctgtaatcccagcactttgggaggccgaggcgggcagatcatgaggtcaggagtttgagaccaccctggctaacacggtgaaaccccatctctataaatacatacatacatacatatatacatacatacgtgtaacactgaaagactagataggtcatgggaagagatggccccaattgtgaacttagtaggattaggttcttcctaagctaagagctacatttttttgggaaacagagtctcactctgttgcccaggctggagtgtagtggtgtgatcatagctcactgcagccttgacctcctgggctcaattggtcctcccacctcagcttcccaagcagctgggaccacagacatgcatcaccatgcctggctaattttttaaattttttatggagacaaggtctccctgtgttgcctaggttgatctcaaactcctgggctcaagcgatccacctcccttggcctcccaaagtgctgggattacggaggtgagccactgaaccaggcttgcctgtctggcttgctcacagttgcagcctcaacaattagtacgtaacagatactcaatttttttttgagacttttttgagatggagcttcactcttgttgcccaggctagagtgcaatggcgcgatctcagctccctgcaacctctacctcccgggttcaagcaattctcctgtctcagcttcctgcctcctgagtagctgggattacagtcacctgccaccacacccagctaatttttgtatttttagtagagacggggtttcaccatgttgtccaggttggtctcaaactcctgacatcaggtgatccacctgcctcagcctcccaaaatgctgggattacaggtttgacccaccgtgcctggcccccagacactcgagttttaaaggaatgctataataaatagaaattattttacaacagtgggatgatactatgttttttttgttttcgttttttttttttgagatggagtcttgctcttttgccagcctggagtgcagtggcgcaatctcggctcactgcaacctccgcctcccgagttcaagcgattctcctgcctcagcctcctgagtatctgggactacaggcgcgcaccaccacacccaactaatttttgtatttttagtagaaatggggtttcaccatgttgaccaggattgtctcgatctcttgacctcgtgatccacccaccttggcctcccaaagtgctgggattacaggtatgagccaccgcgcctggcagcataccattatattttattttacttggatttaacaaaaataaaaagaaattgaggtaaaactggtgacattattggatcattcattcaggcagatttcagaatttggagtcattatcccatgtgtttccacttcagtcaatatcctttagctccctgcttagaaataggaattagccttcttaaactcctccctcgcttacctatttttgttagctattgtaaggaacatggctgtgctttggtcaaggataggccaaggtaagatgtttacatcctgcgtgactcagcaagtttagacagaggcgtataactccacttgttatcacagccatgtaggcataacatgggaaggtcatcacttggctctaagccactattttctgtaaaaggtataattgccctgctgatactgtacaggcgttcgtgcccagagaaagagagagccagagctgtcagtctttgcagacagacagggggagccagatcacagctgagagagagttaagctgctgaccctgaaggcaagggagagccagcctcgcagttgtgtgtgggagccatgggactaagcagctgagacaaggcagacagtgtgagagaactagtgtaagtaagctgctgatgagagctgctgctgaataaaatcatctttcacctgcctaccgtcccctgagtgttctttcagctatctgttcatccacccactcccctcagacctcgatatgggctggaacctggctgtgggcatgacagttggcatagtcgtggacctgacagctatattatacactgtcaagttttaaaacatgtatattgttttaatcgtaattctcacatttattagtcttaggtattgaaattgattattttttcacattattatatatatttttttacctattcaataaatgttaatacttgtggaagaatcgtggaatcaaaactttgtcctttttttcttttaatcttttttgtaatagagacggagtcttgccgtgttggccaggttggtcttgaactcctgagctcaaacagtcctgccaccttggcctcccaaagtgctaggattaaaggcgtcagccaccgcacccggccccaaacgtttaaatagatgtatttcagaactttcagataaaaaatgaaagtaggtttctcgtgccgtgtcgtttagggaaagacggcgacgtctgcacagtttagttgtgacaccaagcagttgttcgtccccgaacctggatgggctccgagggcgcagtgcctccaggagccgccaggggccgccaccgccggcggtgcccgacagcgctgccgtgtgcgtcgcctgcgcgccgccggaaaggaaccctggtccggaggcggcggcgcagtgcatcctgggttggcgtagccatggcgtctcgtgtcctttcagcctatgtcagccgcctgcccgcggcctttgcgccgctgccccgggtccggatgctggccgtggcccggcctctcagcaccgctctgtgctccgcggggacccagacgaggctcgggactttgcagccggccttagtgctcgcgcaggtgactcgtggtgactttgctgccgcttggcaagggtcagggattgggcccggtgggggtgggggccgggcatccggggcgcgccagctgcaggcaggggtgacccggggggcagccggctcgctccgcagccccgctgcctaaaggtgtttagttgacccctgacgggaggccgggtgacctcgtaataacgagcaagagcactgactcgagtccagcactgctgggctgccgcttaccgaaactttggacaagtctcctagcctggctcacactcacctgcaaaattgggatcctggtctctaccttgcggagtagcaatgaggattagatgagttaatgcggctagagcacctcgtacggtctcaaaatagcggtcaccgtattgtagtgaaagcagcatgcaaagaggcagccacactggcctacagccttctccagagcggttttctctctgcagttctgtccttactcttccctgcagcaccttctgcctgtgtccaggactcctggaagtaattctaggaaacaagccaagtgacctttgaacaataaggatttgaattgcgcgggtccacttatatgcggattttttttcaaccaaacgcgaccagtatttacgggatgtgccgccccgcgtataaggagggcaggctcttcctataagcggattctgcaaggctgactgcgggacgtgagtgtgcggggatttgggtatagtcgggggtcctggaaccaatctgcgcaaataccaaggaacgactgtacctgtagtatatagcttgagctgatgaaatctgcgtgaggctgaaacgccgggaggcagtgatttcggtgttgttgttgttgtttttgagacagagtctcgctctgtcacccaggctgtaatgcagtggcgtgatctcagctcactgcaacctccggctaacggcaacctccgcctctcaggttcaagcaattctcctccctcagcccccccgagtatttgggactacaggcgcccgccaccatgcccggctaagttttgtatttttagtggagacggggtttcatcatattggccaggttggtcttgaactcccgacctcgcaatccacccgcctcggcctcccaaagtgctgggattacaggcgtgaaccaccgcgccctgccttttttttgttgttttctgagttctccagatgactctgaagtgcagttgggaataaaaataaccgtcttaaggtaggatagactcccaaggtcaagttatgaaaccccttttcaaagtcatagacttcaggtaatagtggtttcaaccttgactgcatgttagtgtgaaaaataagtgtgtctggccaggcgtggtggctcacgcctgtaatcccagcactttgggaggccgaggcgggcgaatcgcttgagcccaggagtttgagaccctcctaggcaacatggtggaaccccgtctctacaaaaaatacagaaattaggccgggcgcggtggcttatgcctgtaatcccagcactttgggatgccgaggcgggcggatcacgaggtcaggcgatcgagaccattctggctaacacagtgaaaccccgtctctactaaacatacaaaaaattatccgggcgtggtggcacgcgcctgtagtcccagctactcaggaggctgaggtgggaggatcgattgaacccaggaggcagaggttttagggagctgagatcatgccactgcactccagtctgggaggcagaccgtcttaaataagccagccagcccgtgccagatcgacagaatctagaagtgagtactaggcgactatttttagaagtcatcaagtgtttcttttgtgaagccagtgttgctgttcactgacagtgtaatggattcattcattgggcactgccctgttggctgtatcaaaaggtgaaaagtgtcaccttgaaattaagggttaaaggccaggcgcgatggctcacgcctgtaatcccagcagtttgggaggccgagacgggcggatcacgaggtcaggagatggagaccatcctggctaacacggtgaaaccccgtctctactaaaaatacaaaataattagccgggcgtggtggcgggcgcctgtagtcccagctactcgggaggctgaggcaggagaatggcatgaacccgggaggcagagctttcagtgagccgagatcgtgccactgcactccagcctgggcgacagagccagactccatctcaataaataaataaataaataaataaataaataagggttaaaaaggcagtagttagaattgatgagtgtctggttcctaagattgatttcaacattgggctaaaatgtgaagtgactgtctttgttcttacagcattgattctcagttgattggacatacagatcacttaggttggaatacagattctgattcagttctgggaaggggccagagagtttccacctccagtgggcttccagaagatcctgctgcgggtgttccttggaccatgctttgaatggcaaggagctcagaaatgttccactatggcggcttggcttgcatatatagcagaggaaccattttatttatatttacaaagtggttttgactaagttcattcaaagatattgagggccagctgtgtgccaggactcatgctagctgttgagagatacagagatggatacaaaaggaagacattagcttacatcttcattgaacgctttgcagcccttatgtccaacttgctggctccttctctgctgctgtcttcttccctaggctgttgtgacactgttctcccttggttggtttgtcctcctaccttgttgggacactttgcctttcaggctggagtgcagtggcatgatcgtggctcactgcagccttgacctcctggactcaaatggtcctcctgcctcagcttcctgagtagctgggactacaggcatgagccaccacccctaattttttgatgtctgtcttctttttagagacggaatctccttatgttgcctaggctagttgtgaactcttgggctcaagcaatcctcctgcctcagcctcccaagtgctgggattacaggcatgagccatcacacctggtgtgcctaacccttaaatgttggtgggctcccgagttctcttaccacacatgctccctggactcttcactcctggtttctgttattgctgtatatcccagacctccgcctccagtccttgtttatctcatttggaccattgctcatgctacctattccctgctgtgaaatttcctctcctcaaatccatccactatgccaacttcagagcaactagtcactcatttacaccctttttcccaaaaggagctaaggcagttttcctgggtataaaaataccagatgatataaaatagaaggtaaggaaaaaacaaaaaaacaaaaaccaagggcaatggcctaaaatgcagcctggaagtcttatacttgatccaggtaggccccgaatctacactgtctagcagatggagcacaaagataatttccagcagttctatggggcatggtacgcagatgaagacagcacttgtacaaaaaaaagctagctattccaggactgggaccaggaccagacaaagtcccagtcccttcccatggcccttaaggctctgcagacctgggccctccctcttagcctccaagcctgtcatctgtgtaccatctcccaacatgagctgatgtcttctcacatagacacaggcactgcactttcatgtctttttttttttttttttttccagacaaggtctctgtcacttaggctggagtgcagtggcatgatcatatatcagtgcagcttcaaactcctgggctcaagcaatccttctgcctcagtcccttgactagctgggataactggcctgcgctaccacgcctgacctcatttcgttttcttgacctgttcttccctctccttgaattatcagtctcagctcttttcctcaccaaatccaagtctggcattctcctttccggccactcaaggactgagtgacaacttttgttattgcatcagcctacagatacttctgtcatggtgcttgccatatttttatttcaactaaaatgatctgtggattggtcttttccattagagtgtaagcttcttttgggggaaggttgtgtcttattcatctttgcatttccagcccattgcacagttcttggcacacaggtaaagttcccaggcttctgagacagtcgtgtaaataaaggcaaggcattgtgaaacaggtgtgtgtagtgcaaaagcaaaaagagatacttgaccaacctctcagtgaacgtgatcttgaaggcctgtgcagaggccaggaagagcctggcacttacctccttgtggttgactcttagggtgtctggaagggaacattgttggggggaagagagtgagcatatcatgaagggagctgtatgctgcagcgaggaattgtgggtattctctgcaaaggtcatagggagtgaacatgaaacagggcttattgaaggaataagccccaggtggcggagaaggaacagaggtctgtaagcaggagttttggagacaggtcaggagttcatttccaaactgttgagtttgagaggtctgggctgcctgtgtagagtggaccagtcggcagtttgtagagacggcctttaaagccctctccttagcctcctctgagtttgcctcaggcagaagtgagccccagtggagtaccgggattctgatggaacctcatctgtttgaattactagcccagagggtcatcactctttacctgcaaacagtaccttctctgatgtctgggagaggtggtttatttcccatatacttgttaagtgtagatcttggggaagaacaactaacaccagaaacatcacatgttggctgttggggaggtgcttgtccattttgtttcccttttatttttttcccaatcaacagagatccagttagaaggagcagcaagaccttccaggaggccatgctggaaggacatggggtgaggaggatacctaaccttcccttgcctcagtttctcatctgtaaaaaggagggtgatagtatcatggatctcaccagaatactggagagctgaagaaagatgatgtgtgtaaagtgcaatatcatagcctgagctgataagaaattaatggaggccgggacgtggtggcttatgcatgtaatcccagcactttgagaggctgaggtgagtggatcacttgagaccaggagttcaggaccagcctggccaacatggtaaaacctcatctccactaaaaatacagaaattagccaggcatggtggtgcacgcctgtaatcccagctacttgggaggcagaggcataagaatcacttgaacctgggaggcagaagttgtggtgagccaaggtcacaacactgcactccagcctgggcaacacagtgagactctgtctgaaaaaaaaaaaaaaaaaaagaagaaatagagaccagaggcaggagcatgagagggtagtaggatcaagtattttggggctacgctacagccaaggtatcaaactagctgctgctggtcattgttctcaggatcctactaaataaccctaaatagcacttactgtgttaagtgccagccaatgtccaagcctttacttcatctcactgatgcttcacaacagtcctgtgagtgtggtactgttgtttatccccattttacagatgaggaaactgagatgtagaaggttaagtaacccacccaaggccaaacaactagtgagagccagcaccatggtgcaggcataggtggtctagtttcagcgtctgagctcttgcccactaacttactgcctcacgctgatcctgatgcagcacccactctagattggcatgtggcctccagtcagagactcatttaatttaatcacatggtgcccacctggcccttgtaggtacttgccggagctgctgaggacaatgctgacaacctagttggcctcatgagtagttgtgtacgaacatagaatataccctcaccaggggtcttgctttgttgcccaggttggtctggaactcctgggctcaagcgatccttccactttggcctcccaaagtgttgggattacaggcgtgagccaccacacctggcatcgtaccatttctttttttttttttttttttttttctttttggagacagagtctcaccctgtcgcccaggctggagtgtagagccatgatctcagttcactgcaacctctgcctcctaggttcaagtgatcctcccacttcagcctcctgattagctgggattataggcacacgccacgatgcccggctaatttttggactttcagtagagatggaggtttcactgtgttgggcaggctggtcttaaactcctgacctcaagagatccgcccaccttggcctcccaaagtgctgggattacaggcgtgagccaccacacctggcctcgtaccatttcttgataagcacacagcctctgttagatccctccaactgaaatttcttttctgccattgccatattacctcatttcttctccccctttctctttattcctttcttctccattttatttgtgacttggaaacctatttgagtcattgttaagtaggccggtcatgtgcctgtataaaaggtctccttaacccatgtataatacgaaaggagactagacatttagacaaagaaacatgctctaaaactcttgaaagtactcagaaaggctcgttagaatatctatcatactctccaactcatctctttagtttgctgattaaacctgattttttttttttttttcttgagacggaatctcactctgtcacccatgctggagtgtaaatggcgtgatcttggctcactgcaacctccgactcccaagttcaagcgattcttctgcttcagcctcctgagtagatgggattacaggcacatgttaccacgcccagctaacttatatttttggtagagacggggtttctccatgttggtcaggctagtgtcgaactcctgacctcgtgatccgcctgcttcggcttcccaaagtgtggcaattacaggtgtgagccactgcgcccagcctaaacctgattttaataactgacttctttttcttttcttttttgagacagagtctcgctctgtggcccaaggtggagtgcagtggcacagtctcggctcactgcaacctctgtctgggttcaagcaattctcatgcctcagctacctgaatagctgggattacaggcacacaccaccacgcccagctaatttttgtatttttagtagagacgaggcttcaccatgttggccaggctggtctcgaactcctggcctcaagtgattggctcacctcggcctcccaaagtgctgggattacaggtgtgagacacacatcggcccaatatctgttctttatgcaagatgaatgtttcttctacagaggttatactggtttggttctctgggcagtatttattatgatttttcatggacctttgtgagtttcagggacctgagccctaacaagcagccccactttctatagggaaatgcctgaagaacgccaagcctcggacttaaaatcaacttcaggaggtaaacaaaccaatttagattagggatttctttctttttcttttttttgagacggagtcttgctttgtcgcccaggctggaatgcaatggcgcaggctcggctcactgcaacctctcctcccacattcaagcgattctccttcctcagtctcctgagtagctgggattacaggcgcccaccaccacgcctggctaatttttgtatttttagtagagacggggtttcaccatgttggccaggctggtctcgaactcctgacctcaggtgatctgctcaccgtggcctcccaaagtgttgtgattataggcgtgagccaccacgactagccagattagggatttcagtagtgagcaaaactgccagataccctgttttgttttctctgattctgcgtcgtaccttccacagcattaaaccccctgacctgtaattgcagctcattccacatttgttgaatgaaatctggtcaataccctaatacctaaacattgagccgactaataccagagatacgtgaggtattgctctaacatggcacaggccagaagggctcatggtttggctggtggccatgaggcaagcctcgctggaagggaaacagattggaatgtagtgactgtaagctccctcatcccctctttgggtgggaggccagcttcctttgtcctggctgagatcagggagataactgctggaaccaaactagacctttctggtgtatggtcctcaatttgaattgcctttgggtttaccatgacagctctttccttttgggttattttgacttgggtcagcctattaaaggtggtagcaccctgtagaggcctcgggatgctgaagatgccatgagaagacacaggcattctgcagacgctagacaattttagtggcagttagtgtcgcagagcagtatgaatgtccagagcctgagggttgaagccaggaggcagaggggccggtcctgactcccaggaaggaggcctgagatgctgctgaactgttggggcttctgcgattacccagtcctgcaacttagtgtgtcctggtggccacaatgagaatcagatgctgtgggttctctaaagccccgaaagttctgtgaaagttacctataggcttgtgcattgatttagaggtattttccattcaatgacagtgtttccttcctgccgtcgctctaggttcctggtagagttacacagttgtgccgccagtatagcgacatgcctcctttgacgttagagggcatccaggaccgtgttctttacgtattgaaactctatgacaagattgacccagagaaggtaactgatggtggtttgaatttttttctttaaatatagagtatttaattacatgctagaaaatgcaaagggaaagatactcagtaaaaatctccctggctcccagacacccaggcccattctgggagatagccagcgctaccagtttcatgtatgtttccaaaggtactcaatgcatatgttaaagaagtatacacacgtgtgtatattatatgtatgtatctctcaccctttttaaaaaacacaactggccgggcactgtggctcatgcctgtaatcccagcactttgggaggccgaggcgggcggatcacctgaggtcgggaattcgagaccagcctgactaacatgtagaaacttcatctctactaaaaatacaaaattagccgggcatggtggcacatacctgtaatcccagctgctcgggaggctgaggcagcagaatcacttgaacccgggaggtggaggttgcagtgagccgagatagcgtgattgcagtccagcctaggcaacaagagtgaaactccatctcaaaaataataataaataataaaaacacaagtggggccgggcgtggtagctcacgcctgtaatcccagcactttgggaggccgaggcgagtggatcatgaggtcaggaattgaagagcagcctggccaagatggtgaaaccccatctctactaaaaatacacaaattagacaggcgtggtggcagacacctgtaatcccagccactcgggaggatgaggcagagaattgcttgaacccgggagggagagggtgcagtgagccgagatcatgccactgcacactgcagcctggatgacagggtgaaactccatctaacaacgaaaaaaaattgaatctgttgtgtaggtaaggcagttttttttttgatttgggtttttgaagaatcattcctggtgatcctgaggtctaaattagagtgatagggtgatagtaaacactttggccaggcgcagtggctcacgcctgtaatcccagcactttgggaggccaaggtgggtggatcacgaggtcaggggttcgagaccagcctgaccaacatggtgaaaccccgtctctactaaaaatacaaaaattagctgggcgtggtggtgcacgcctataatcccagctactcgggagtctgaggggtgagaattgcttgaacccgggaggccgagtttgcagtgagccgagatcgtgccattgcactccagcctgggtgacagagcaagactttctcaaaaaaccaaaaaacagacaacattagagtgaaatccttcattagctatgtatatattgttcacttcaaaacagagtaagataaagcaaaccatatacatactagcataggttacatataaaatgtcagttatagcctctgtatgttaaaaaaaattcgatgtagtcacaaggacagaaaaccaaacactgtgtgttctcgctcataggtgggaactgaacaatgaggtcacttggacagagggtggggagcatcatttaccagggcctgtcaaggggtagggggcttggggagggacagcattaggagaaatacctaatgtaaatgatgagttgatgggtgccgcaaaccaacatggcacatgtatacctatgtaacaaacctgcacgttgtgcacatgtaccctaaaacttaaagtataataaaaaaattcaatatagtgattaagtggcattgtaccaccctgttatcttgggaagcagatgctttcatggactaaattttgtgtttggtgctcctttcttgcagctttcagtaaattctcattttatgaaagacctgggcttagacagtttggaccaagtggagattatcatggccatggaagacgaatttggtaaggctcagtcttctatctacacactgcgatttttgattaaggtggattaaactgaaagaagtggtgggcgtctgaattggaattagaattaaatattaatagaaacagtagcatccactgcccttcacacacaccttcctgcccacttaccatcaggtgaagtaagctttagggatggtacatttattcagagagcaccttgcacaagcccagcagagtgcccagtgtggtgccaagagccgaatgaccagagatggttccaggggactgattcttcagacagggttctaagacaaagggcaaaagcctccccggaacacatgctgatgacatgtcagcccctcctgagctcgggtaacgcgaaccaggtagaagtaatgtgtgccaggacaagagacgcacccagagcctctggccttggtctcctatcctggctcacaagcacactccaagtttgggactgtgtgttgggcaggtgagacctttataaggttccatggctgtttctgcgtgagttggctgaataggaaatcaaaggacttctgtgctgttctgcagagcagggcctagttaaaattcctcacagatgatgctgactaggatggaatccctttgcctagtgcttaagagtaccaggtctggaattgagcttagtcaggtatgagcctggacaagtaactgtatctctcaaagcctgtttcctcagctgtaaagtgggggtgataatagtaggaaccccaggattggaattgctgtgagaattagagatgatgtgtaaaatgctcagcacagtgtttgggccaaagtaagctaactaccaaaacccagccatttataaaaacccaaccatcataaaaaaaaaaatgcatgggtgacgtgtgttacagcacacgaaccttgagaacgtgctgagtgaaagaagccagacacagaagatgacacgttatataccatttacatgaaatgtcaagaagaggcaaatccagagatagaaagtacacgaagtacacgggtggttgccagagctagggaggatggggagtgactgctgacgggcactgggtttcttttttttttttttttttttttttttttttattgatcattcttgggtgtttctcgcagagggggatttggcagggtcataggacaatagtggagggaaggtcagcaggtaaacaagtgaacaaaggtctctggttttcctaggcagaggaccctggggccttccgcagtgtttgtgtccctgggtacttgagattagggagtggtgatgactcttaacaagcatgctgccttcaagtatctgtttaacaaagcacatcttgcaccacccttaatccatttaaccctgagtggacacagcacatgtttcagagagcaccgggttgggggtaaggtcatagatcaacagcatcccaaggcagaagaatttttcttagtacagaacaaaatggagtctcctatgtctacttctttctacacagacacagcaacaatctgatttctctatcttttccccacatttcccccttttctattcgaaacaaccgccatcgtcatcatggcccgttctcaatgagctgttgggtacacctccctgacggggtggctggccgggcgggggctgcaccccacctcccggacggggcggctgccgggtggagacgctcctcacctcccagatgggctcctcacttctcagagggggcagccgggcagagacgctcctcacctcccagatggggtcgcggccgggcagaggcgctcctcacatcccagacggggcagtggggcagaggcgctccccacatctcagacgatgggtggccgggcagagacgctcctcacttcctagacgggatggtggccgggaagaggcgctcctcacttcccagactgggcagccgggcagaggcgctccccacatctcagacgatgggtggccgggcagagacgctcctcacttcctagacaggatggcggccgggaaggggcgctcctcacttcccagactgggcagccgggcagaggggctcctcacatcccagacgatgggcggccaggcagaggctgcaatctcggcactttgggaggccaaggcaggcagctgggaggtggaggttgtagctagccgagatcacgccactgcactccagcctgggcaacattgagcactgagtgaacgagactccatctgcaatcccggcacctcgggaggccgaggctggcagatcactcgcggttaggagctggagaccagcccagccaacacagcgaaaccctgtctccaccaaaaaaatacgaaaaccagtcaggcgtggcggcgcgtgcctgcaatcgcaggcactgggcaggccgaggcaggagaatcaggcagggaggttgcagtgagcagagatggcggcagtacagtccagcttcggctcggcatcagagggagaccatggaaagagagggagagggagagggagaccgtgggaagagggagagggagagggagaccttggggagagggagagggagagggagaccgtgggaagagggagagggagagggagaccgtggggagagggagagggagctgggtttcttttacacaatggtgatggttgcacaatgttgtgaatatactaaaaactaccaaattatatggtatatacaaggaggaattttctattatgtgaattctgtctcaacaaacaaacaaacaaacaaacaaacaaacatacctccaaagcatcgtacccaacctgtatgcatactgtctagaagctaactggcccacaacctatatgggattcaaggttgctgaaagttttgatatacttgtagctgttgtagaagggtcaggtgtgttcagttctaaaggattttttttttttaactctctcacattgttgtatatttttcttttagggtttgaaattcctgatatagatgctgaaaagttaatgtgtccacaagaaattgtagattacattgcagataagaaggatgtatatgaataaagtatcaggtaaatagacttaaaaaatgatgttcacccatagatttgtctgtggttcttcaataaaggaaacttaagaagaaacagaaaatggaaatgcttgaccaagatttttcactacttataaaatgcaagccctttcctgttgtctgccactcaaaggggcccagccctggtggtgatctttgagaggttgagaactgtcattcctggatagaactcccttgattgtcagctgtcctcacaaaagcagaacattgtacaaagtactgaacagggtaacctggaaacagacctctgtctccctcaattactcagccaaggtaagcccagcctgctgggtaagacactgaagtgacctggctcttaagtaggcaagagaggcctcatgtataagaggatggactttggagtcagagacacccaagtttattctcagctttgccacacactataagcctggtggtctcaggcaggctgcttagctctgtaagcctcagtttcctcatatgtaatatggtggtaatgataggacctacctggggcttttgtgaaagcaaaattgaagagagtatatatatcacttgatataatgatgtaaagaagcctctcagtaaatagtagcttttgttacttgggacctagaataatcaaataagactttttgaattaaaacattgtattagtgtttttagtctttagcttttagtgaccctgcatttttttttttttttttttaaagatggaaccttgctctgttgcccaggctggagtgtagtggcacaatctcggctcactgcaacctccgcctcctgggttcaagcaattctccggcctcagcctcctgagtaactgggattacaggcgtgcacctccacgcccagctaatttttatatttttagtagagatggggtttcaccatgttggccaggctggtctcgaactcctgacctcaggtgatccgcccagcttggcctcccaaagtgctgagattacgggcatgagccactgcactcagccagaggctgcatttttagcacctgaaagatgtcacttatcattagtaagaatacatcaaaaataacattgaacttattttgtcttttccagaccctttggctttgctgagagaggactcagatgatagtgacgaatgtctggcagtgaggacacattttggcattcttgctgactctgacagagtgattctgatggacttgtatttaaattgtatgtgttttactctttgaaaataaatctataaaaccaacattttcccccatcttcagtttttcaatgatgtctataaagtgcttttttatgtttgtatactgacattgcttaatatttttaaaggtctgatttgtcatttgtattcatgcatgtcaaaaacaatggcttccccagccatgtacttgaagtaaggctgtctccccaccttcgtatcaggagtgaatatattcatggaaatggactttttgcttcaaaaaaaactttgttttggtttccattagcttattatcagatgtgtcagctgatatcagcaggtgggactagtttttcatcactgtcctaaagatcccttttaatacagtttaacagttttggagaatgggaggctctctttcctcctggaaggtcagtttgacattgccacacatcaaaccacagtttgatttgtcacacatcattattggttctgccccttttactcttagcactgtgttggttccttggggttgatgtaaataacatgtatgcattgcttagctcttgaagagtttagtttgagagttacatcaaaataattcctctccttttactgactttctagtatggggaaggaagaggaaccaaaggcctacagtaagtagtgtctttgaggcagacggactaaggtgaggggccctcagccagcagagaatctcatggctgagagatgaggtggtcgaaggatgggagtcagctctgggattgggtccacactcacatctgcttcccttcctgcaggtaccaatacgctggttccttctgggttgctctagagttattccaggcatgttaggcagacatagtcctttttttttttttttttttttttaacttttatttaggttcaggggtacatgtacatgtttgttatataggtaaattatgtgtcatggggtttggtgtgcagattatttcatcacccaggtaataagcataataccccatgggtttttttatttgagaaggagtttcgctcttgtcgcccagactggagtgcagtggcacaatcttggctcactgcaacctccgtctcccaggttcaagcgattctcctgcctcagcctcccaagtagctgacgttatacccgccaccatgcacccgccaccacctggctaattttttgtatttttagttgagacggggtttcaccatgttggccagcctggtattgaactcctgaccttaggtgatccgcccacctccgcctcccaaagtgctgggattacagatgtgagccactgtgcccagtccctgatgggtgttttttggagcctcaccctccaccctccagtaggccccagtgcctgttgttcccttctgtccatgtttactcaatgtttagctcccacttaaagtgagaacgtggtatttggttttctgatcctgtgatagttcacttaggatactggttccagctgcatccatgttaccataaaggacatgatctcattttttatggctgcatagtattccatggagagtgtgtgtggtgtgtgtgtgtgtgtgtgtgtatacacactttcttttttttttttttcagacagtctcactctgtcgcccaggctggagtggtatggtgctatcttggctaactacaacctctgcttccccagttcacgtgattctcctgcctcggcctcctgaatagctgggattacaggcatccgccaccatgcccggatactttgtatttttattagagatggggtttcaccatgttggccagattggtttcgaactcctgacctcaaatgatccgcccgccttggcctcccagagtgctaggactacaggcgagagccactgcacccagcctacacattttctttacccagtctgcagttgatgggcatttaggttgattccatgtctttgttattgtgaatagtgttgcagtgaacacaggcatgtgtgtgtctttatggtagaatgatttatattcctttatgtatatccagtaatgggattgctgggtcgaatgcaaacctcgttttctttgagttctttgagacattcactgtcacccaatctgagtgcagtgacacgactgtggctcaccgcagcctcaacctcccaggctcaggccatcctcctgcctcagcctcccaagtaggcacaccactgctaattttttaagttatttatagagatggggtctcactgtgttaccccggctggtctcgaactcctgggctcaaaagatgctcccgcctccacttcccaaagtgctggaattacaggcatgaggcactgcacctggcccctttttagcaatagaaagcatatcctcagttatgaaaatcatacattgttacactagaccttttttatttttttgcaatacttagcaacatatcttggaaaactgccaaattggaggataaggctcttcctcattgtttttttacaactgcatttatttaacaatagcttgagcacttactaagcactggtgatcaaatagggagtaaacaggctgtgtgttattcctttgattggaacgtctagtagtttaacactgggggtattttggtggtagtccccaagttgttctggctattttaaatcccatggcagctgtacattttaccaaaaaaaagcgtctgtgattgtgtctgcctaagatcacaaagtctgactgtactgccacttgagtgcctgctttgctactatcttcaccagacgcctgcagtgaaacagcccattcacatcatccagtagctggtgtaagccccaaagaagccagaatgagggaagacatttactggatctcacacacacacatcattcatccccaaggccatttagggtctggttgttcaagcaatagcaaaggcctttctgttctttctgctctaagagcttatcagaatgttcttttgagagacttctgtgccactataggtaggcagcaaactggccaaatgtagcattccaaagtgtgtgtgaattcaagaacaggataaatggaattgtatgcatatggtatttaatagctgctgaaaacacctcagaggatctgtgcctctgttgtacaccgttcccactgggaaagggcggtttgtgaagcctgtcatgacccagtcccagtcctgtctccagccatccccaccatatctccagtggagctgcttcagtcttctcactgtgttctccatacagcaagttcactcactcgctccacacacaaggaagtacccactgtgtgttaagcactcctggagcctgagtacacagtttcacaccatatagtttgtctcccatctccaggagctcaccaccttgtaagggaggtaggtacaacctaggtggaggtatcatactcagcatcaccaatgatacaacaagtcaacctcctatgctgctcctgatgtgaggcactgaggtcatgtcacctctgaggcactcttgctaaaatcatctaacctgaatctgattatgaggaaacaaatccagaaggtgggagtttataaggcctggactttaaaaagtgtcatgagaggcccggcatggtggctcatgcctgttctgttaatcctagcactttgatttgaggccaggagtttgagaccagcctgggcaatatcgtgagaccctgtctcttcaaaaatattaaaaattagctgagtgtggtgtcacctgcctgtagtagcagttagtcccagatgtggagattgggataaagagagatggatgggcaagagattctgggaataaaatggcagaacctgggaggatcacttgagccagggaattagaggctacggtgagctatgactgcaccatggcactccagcctgggcaacagagggagactctgtctctaaaaaagaattgaaaaataaataggcggggtgcagtggctcacacctgaaatcccagcactttgggaggctgaggtgggtggatcacctgaagtcaggagtccgagaccagcctggccaacatggcgaaacctcgtctctactaaaaatacaaacattagccaggcatggtggcaggtgcacgtaatcccaactacttgggaggctgaggcaggagaatcgcctgaacccgggaggcagaggttgcagtgagccgagatcatgccactgcattccagcccgggcaacagaaactccatctcaaaataaataaaataaaacaaataaatggcagaatctgatcagttgtgtctaagctatctcccaacataccagtactgggtgagttgcggtctaaagcaggtaccagaggattggatttgatgcattgaatttgaggtgtttgtaggatacctgagcaggcaacagataatgagcaacagttcaagaaaaatgtcaggcttggagtctgagcgctggtgaggtgcttccccagtgccggctccctcctgctaagttcccattgaggagtcccctcaccctactctaggaagtggcttaagtgggaatgattggccctctgcccctgggatgcgcacttaagtacttgagcgtaatgtgaattcttcttcagggatgatttggtgctggggttgagaagctaggagaactgagtgaaagacttacctatcacctgaaattctttatcaagtgcatgtgttactgttttaatttttaaagtggtagccaactaataaataaagccaattaaacaaatgtaactgacaaattaactttattaatatgcaaagctaattaataaagccaacaaacaaatgccaaggttcaaagtttaaaaaagcaactcacacacccaacttagtgccctgaagacacacagcaaaaccaaggaaagaaaaaaatttgaaagcaaaataaagcagctgggttctttcctaacttctcaagtaccaggccagtatctaagagcacagactttagcatcaggcaaagctgggctctgaattgtagcttcactcggtaacaggcatgtgatgttggctaagccatctaacttctctgaacctaagatttcctctagtggctgaagtgagggtcacaggagggatgtggtgcagtgttgactgtataatgcaagtaacatccttcacactgttaagacataaggaagaagctgatgtcacaggacctgaatgcagagtgtttagagcaagtacgtagtggaagagcgcccaaaggtgatgtccattcttccctccagggctggaggcctagagaaacagcatttgcctggcacacagcaagaggtcaaaacaccctgctaggtggtctctttttttttttgagatggagtttcactcttgttgcccaggctggagtgcaatggcacgatcttagctcactgcaacctccacctcccaggttctagtgatcctcctgcgtcagcctccctagtagctggaattacaggcatgcgccaccacgcctaattttgtatttttagtagacatggggtttctccatgttggtcaagctggtctcgaactcccgaccttaggtatctgcccgcctcagcctcccaagtgttggcattacaggcatgagccatcacactcagcctagaagtaccagatagcagattctccagatgggcatcagccaacgtatagcatgggatacaatcccaatgatccccctctcccatgtaggagtcagatccctaagcatccagccgtattgtttcaggattatgaggtactgtgaaaaagtgaagagctgaccccctccgcctgctaggaagaagtgagaccagcagggacaaactccatcactcttcatataccaaggattctgttttagtcccctgcctttttttttggcgggggggacaggatctcactctgccacccaggctggagtgcagtggcacaacctcagctcactgcagcttctgcctctggggttcaggcgattcttgtgcctcagcctcccaagcagctgggactacaggcacctgacaccacatctggctaatttttatattttctagtagaggcagggtttcaccatgttggccagtctggtctcgaactcctgacctcaggtgatccatccacctcagcctcccaaagtgctaggattacaggcgtgagccaccgtgcctggccgatatctgtattttttgtagagatggggctcttgctatgttgcccaggctggtctcaaactcctgggctcaagtgatcctcccaccttggtttccaaagtgctgggattaccggtgtgagccagtgagcctggcccattttttggtaacagattttcttcctcccgactcctgggtctttatagcttgtggctaaatctgtagctccaatctcagtgttttctaaaacatgtcctcaaaggctaaatggctaggtggggttgcccaaggcactagtcaggaggtgtgagtacagggaggcagcttctcttccaacatgtggaagccagggcccaccaaggagcagaccatgctgctccaacaggagtgtggctcactgtcacaccggtcactttcaccattttgcagagtaaatgtcaactgtttcagcagagaatacatttgaatatacttaaagccaaataagaccacaactggcaaagaaatggctccaggtccaattccaaatgttggttaatccccagtatggattaggcgcatgaagaattggaaggaaaaagagacgcaattaattatcaaactttaatcgattgactaatcttacaggataaacaataagacagctattcaaggttacactttaaaaaaaaaatccagcagtgcaaatctaatagactaaatacgttcatctcctcccaaacaggcatttgatttgaaaacagaaaccagaacagagcatacaccacaaggaaacatggtacttacaaatattgtcaaataattcagcagaactctttaagaaaaaaaaaaggttcttagaaattgagaaagcagtagaaccacccagcctggcagatcaatctaccagatgttctgcatgcgagagggctcccaaccacctgtaacttcagaaaggccgccaggcactattacgaaggaaacaggtgcagatcctaactggagatgactttatcacaaagccttaagacaaagggaccatcctcttccaagacaacaggtgtgaacagaggcaaggagcgagaggagagggctccctcagcagatgggtggaaagcaagcctgcccttgcacggcccttggcacactcaatctaccccctttcccttctctgcccctggcaaagaaaggctgggcaagtgcaagagcccagaatggctcctccaggcacatggttaaagtaagagtaagaggaaaacgagccccttctgggtgaaatatggcaacttttctgagacatggcaacgaggcagagttaatctctttggccctcatcaggtaaagcagcaactaaggagcctactcagggccttacgtgggccccttctatgtccacaagaaagtgcatccttagctcagttcaacatttaaaaagagctaacgctacttgcaaaaggcccaccatggattcaaacacttaataccaaagaggtccagcaactcgcgagtctgtctgtgttctgtgatctgaagcagagctaaggggggcctggctcacagggtcacgctcttctgccaaggcgcctcagggagggaaaaaaaggcatgatgatgtctgtgagccagaacctgcaggaggaccaccggtagagattctagaagacaaagaagccctcaggaggctctgagaggtgtccaatgtctaagagacggccaccccctccatctctagcttcgagtcaacgctgttacagtcactctccggaaaccagctcttcctttatccacctgcacggcccctgccacagtgagggaaagatctggtccctctgacagtaaggaaattgtatagaaattatcctgaggaaaaaaaaaaccactgtgacgctacctaaaagaaagagtatttcaatttgcttacacagatttagtcagtacactccagactgtaagaaatgtatgaagagactgcttacggaactcaaagactaaacagtgaatactactgtggcccagacacggatcgaaaacacttctcccagtggcttctggtgctatgtctgctctcccgagagcgtccagcaaggtcttccatgcagacagggtgaggagccacagagctcaagattgttgaagctgatttagtgagctctgtaaagcaatactcaaacagctccgtacgaaaaggtgtcatttacattattatttatatatagtatctcgaagtaaggaaaaaagcaccattttactgaaaataaaaaggctcacgcaggctttggtcctcctgaaatgacaccagcctgagtgagaagcagttggcccttggggagcggggagatgatggaacgctgtcaccggcaagaagggaggccaagtggcccggcaagccacaagaatggggcaataaggggagcaggtggaggggcctcggagagcagccaggctagtctggggatggagccacctgctctgagagatcaaaagtaggtgtgcggcactgtcaggacaagtctctaggactggggcattggcaaacaaaaggggcaatgtctgacccgagatgatgttctacttaatgcatctcatttcccccaaaacctgtcacctgcagacagaggcttggacaagtagctcagatgtactcttttccccaggaactgcaggccgacaaggacagaaaagctgcaatgactgctcctttctcaagggatgaaaaaacaggctgtttcttggatgctgcacttcacaaatgtactaattgcccccaaaaaagcaaagagtagattttcctgcctagatgcatcacttggcattgactacaccatggaaagcaagagtctgtctatgtgggctggattcctgaactacagcttagaagggaagggcgtagaatatcatcattaactggctcacaaggaatagtcatcttgggcgaacacatgctaatacgtttcacagaatgaggggtgacagcctagaatccaaaatgtgatgtttggaacatttctcgccaaaccttactatgaaagcctgcaaccagtgagaggagaactgcaaagacggcagcagagaaacagcaaacagcacaaaagagataatttaccaagagactttccctcctttcagaggcaaccaagccagaaggagatgacagaagttcacgtgtacagagaacagaagggctaaaaccagaagaaggtgagctaatcgtgaaagcaatttatcccatttttgttgttcaataacattggccaacctgctagggtcagatgtcttcttcagaaaggcagcatctctgaacctgggataaaggacacttgaactgaatgcatgagcagaaggacccaatggagaagcataattgaaatcatccttggactgcttaagaatttcttgaaaacttccaaagaaagaaggttatctggatctgcagctatatggctgtataactatcttctacctggctcctcctggaagaggtctttgtctgcttgggagctggggctgttgagcggcacagcccaggcacaaccatgccaggctgggcctctaggccaagctcagtgaggggtgcagacaatcatccaaccagcaatggaactccttggagatgggggcccaaagggcaagacatttaaacaggagtcactgggagatactctgctgctcaacgaacaccacagcaagtgtgagagctccttgcccaagactgagcagctcttcctctcccaccgtgcgttcacaggcagcagcagcacggcgggagggagcccaggaaaggaagcgttgatgaggtaccaaaagaagaactgacatctttgggttcttaaaacaaaaactcaaattgaggaagcgagagaatgaaaaagggaaagaattaaatctgaatcaatggacagaaatatgtggcttactaacccacccccattttgcatacaattttatacaaaaaaggaaaaaaaaaacaccccaactcattgcaatgcagtccaaatgtttgcaaccaaagatgtatgaaaatatttcaattgaaactgctttttttttttttaaaaaaacaaagcttttgatcattcccttgtcaacataattggcagatctactctcaaacacacttaagagtattccacacaacatgttcggaattcagatttattgatttccattgtattgactttaaaaatggtatgaagctgactgcaagaaagggaactggtaattttaagttaaaattaagctaatggtgaaagtacatcacctctggcttcagtcaccacatcacctcagattgaatatagattttttatgaacaaagttccagaactctgaaatccagggatgctgcaggcctctcccggcaatgtccttcactttgggtcagtctcctgggccagaggtgaaagtgctttcaaaaatactgccatttccccagcacagtgtctttgattgcatccacatattgagttggaacccagtacacccagtagtaagaggcttccgtggggcccaactgaaacgcctggaagggaaaaaggaaaaccaagcggtacttcagaggtcgggagaccaagcaggcaggacaaacatgggtgagggttgggatgtgagttaattaaaaagggaagaaaaaccaaacaaaaccttgcacgtggggagcattctcccaaccaaaaacaaaaacaggcaggctgagggttaagctgagccaaccctaaagcagcagttctcaaacctgagtggtcatcagagccatccggggggcttgctggaacatggatcagcaggctccaaccctgtgaagtttctaatttggggaggtctggggtggggcctgagaaactagcaagctcccaggtgatgcaacactactgatccagggaccacagttggagaaacgctgccctagaaaacctgtcacacatgctcaagaaaacaggtatgaatgttcattgcagcactgtctgaaaccacaaaaacctggggcaacctacatatccatcagtaagggaatgcagaattcaaagtgacaaggcttagtcacaccaatactggagctctttttaaagaggtatcaactgggtccatatggatctacagttaatactgacagattcttatgttgaaccaaagaaaagcaagttgtagaacaatacataataccatttacgaaaactggaagcacaaaacaacactccatcttgttcgtggatacacgtgtaaatcaaagaatggatagatgggaaggacgcacgtgacacatgacgatggtaatggggggaggggaagacagtggggccatcattgctgtgaataaactttatttcttttatttaaaaaaattaaagcaaattacaaaatatttacaattgccacttctcagtgatggatatatgggtttgtgacagttattctctttcttttctgtattttatttttattttttctgagctggagtctctctctgttgcccaggctggagtgcagcggtgcaatctcagctcactgcaacctccgcctcccactttcaagcgattctcctcccttagcctcccaagtagctgggattacaggtgcgcgccaccatgcccagctaaatatttgtattttcagtagagacagggtttcaccatgttggccaggctggtcttaaactcctgacctcaagtgactcacccacctcggcctcccaaagtgctgggattacaggtgtgagccactgcgcccagcctcttttctgtattttaaaaacatttctctaaaaatgaaaaagcacagccacagttttccaactgtgaatgatgacatgttaatttagctagagaaatagcatctgcccaaagagataactaagtactttcattaggacaaaggtaaaggtgtttggaaaagagaaggggactactagagctatcctctgccagaaataactcgagagaaatgaacatttcaatgaaatactaagtcattacccatccacaccaattcctccaaagacgtccaaaacagtccactcaacttccttggactccctaccaccacactgcttgaaaagtcaggctacaaaccctacagggtgtgactggcaacacaaactattcaaaaaggagtgatggggcccagttaaaaacattcaagtccaactgtttttttttgttttgtttttttgtttgttttttgagacagagtctctgtcacctaggctggagtgtagtggcacgatctctgctcactacaaccttcgcctcccaggttcaagcaattcaagcagttctcctgcctcagcctcctgagtagctgggattacaggtgcccgccaccacgcccagctaatctttgtaattttagtagagacggggcttcaccatgttggtcaggctggtctcaaactcctgacctcatgatccgcccacctcagcctcccaaagtgctgggattacaggcatgagccaccacgcctggcccaactgttaaaacagaaaaaaataactgaccaggccaaaccaatttgtctgcaatccttgtaataaagactacagagagagggctgggcatggaggctcacgcctgtaaccccagcactttgggaggctgaggtgggcggatcgccaggtcaagagattgagaccatcttggccaacatggtgaaaccccatctctactaaaaatacaaaaattagctgggtgtggtggcgtgagcctgtaatccctgctactcaggaggcagaggcaggagaatcgcctgaacctgggaggcagaggctgcagtgagccgagatagcgccactgcacttcagcctggtgacagagcgagattccgtctcaaaaaaaaaaaaaaaaaaaaaagactacagagagagtaggggtggaagggctgccaaggggcatcatcacttccagaagacaaaaccccaagagccccacagcctagggactgcactcccagctacagccttgctacagccacactaggcaggatgccaacagggctgcctcccttgcccaccatattttaagcccctttgatttttttctatagcaagaggatcttccaacacatctctctgcctgggacttgttatcccaatctactggtcaaaccactagttccttcttttccctgggatgggctgatgtggcttcatcactgtgggatggacactgaaaggcctgcctccttggatgaacaatggccggaggccccgccctcacattacagctgctcaggccaggcccctgatgggcaactgcagaatcaacttcgtggtcaatgtggctcctccaaagagcactgggaaaattttggaaactgcctaagctgctcattttaccagatgaatgaattttttgctttgttctgcagacctgcacaacacctccaaacattctgtcttgggaaagagtagcctgctctctgcagagtgggttctatgcagaatagacgctccacagagcccgtcttccccacgaggccctcagccactgggcctggaagagcggcatcgttattacagaaaagaggctgtctggtgccctcaccaacaccaaggctaagggcaagttttgttttataagcaagataaaacttataatgaaaatccacaagccattcctcctctttatatttattttcctggtctagaaacaacacacgacaagagggaggcaagagagacttttctaaaagaggtaagagaaaacatatcccctttaaactgatggaaggtgtgtgtgggggggtgtaaaataaacagaactaggaatagaggccatggattaagttctaagtagatgaagaaaacatcagggtcttaaaaaagtgcatcttctggagactgagttttcttccgttaaacaagctcagttaaaactgttccctgccaggtgaagtgggagtctagtgagaggggctgaactcagccagcgctacttaccatcatgtggtagtcttcatgtccttcgataggttcactgaccacattttttatggagcccatgggcaatttctcagtccgctctaagttgagagggattacagtgattattcaaagggccctcctgttctaacttctctgactcagcagtccctcatcagggctggtggctgcgggatctacagtaaactcaagtgactggcgccatgccctctggggacaacacgacagggtcttctgaccagtgcacatagggcttcgtgtgggagctgggaactccgtaggagcaagtgggaaactgggtttggcaatggtatagtaaaggtctctgagggcagaattgtatcttccctgggattattttttaaaagtctgatggttaataaatatccaagaaaggccaggcgcggtggctcaagcctgtaatcctaacatcttgtgagtcaggatttggccaaggtgggtggatcacctgagatcaggagttcgagaccagcctggccagcatggtgaaaccccgtctctactaaaaatacaaaaaattagccaggcgtggtggtgggcacctataatcccagctactcaggaggctgaagcacgagaatcgcttgaacccggggggcagaagttgcagtgagccgagatcatgccactttacttcagcctgggccaaagagcgaaactccatctcaacaaaaaaaaatataaaataaataaatacccaagaaattcctttgtaaccttatgcaagcccagcattgactaaggtcttgggcagtagggagagtcaagaggcctacgaacaaagaggcaacacgttcccctgtggctctcacaagggaaggggagtgcctggattttagggctagattctataccacgaccctgctcccttccccggcctccctcctcgagtcctccgcactctatattcacacacttttatgaagttctcttaaaacatttataaccttttgtgattaacacttgagataccactgatcacatggggtcagaagacattgaggcgagtttaaggaggatggcaggtaagagaagggggcagcaagggatgcctggagtgagatgagactgccgggagtgagccaagtgaagcgggacttggtgaggtcaggggaggcgaggtgcacctgcacaaggggacatggccatcctggagcagcagacacctcagggacgggggcgcagggggaggggggcggggaggctcagcaaacagctaaaccaagtggaaaaaaacttgcagcctttgcagaaagaaaaatctggaaagatagagtctaaaaatagataagttggccaaacagactaggaatttagagaccagcgttctggtctagctggggacttaagacattttacttcagttctgtgggcctcagtatctgaaaaatgggggctggggagaagggacctgaagatgtttatttaggtttggacttctagtggctctacaacagtcggccctaaagcaggacctgggcagcagctgtctttaagatggaaacttttaaaacacctttcatcctgaaatgtctggagatttcacaaaaatatacaacagatttctggcttctcttgaaaactccaaaaattgggcaattctggacccacactcctgatcactacatcagaccttcagccagattcaactttcctacgagcagggtacatgctctcctccagcggcttccggtttcctgcctggagcttgttctcattcttttgaggctgttagaactgcctcctcctacacaagctagcagagtttagtcaagagtagcagcccttaagggtcacttactcagcaaagcgccccacgaagaggccaactcgctgctgggatggtcattccatagccgcttcttcttgccagcagaaagacgaagccagtggctagcagccaactcccagaacaagctgtcctcttatgagtgcttatgacacttaggtaacaggactgggcaagtgacaagactgcctgccccttgggctccagaggtacagtgctatgggtgggaatgaaaatcttaaccttgttcaaccctagaaaacatgagtagtccatggccatgctcctcaacaagactggtgagtaaggaggctttcaagggctcagaagccccaacatattgagcttcttctacagctctccctttaggccaaagcaggaaggcggctgctcctactagcaaaaagaaaacttccaatacagggtcaggaagttcttgttctgtcagttcctgcagttatgatgtgttccctatacaacttcctgacacagaaatattccccaaggaaccaatgagcacttacagacttagttcccatccagacttctctgcctgcacctatcttcatggcagggtctttccaggtcagccgtagcaactgccttcaatgaggctgcccacaagcaaaagtagaggtccagcaagaggcaggaagtctatgcacttcagcaagtgaatgtgatgagacagaactaagcaaaatcacctgcaaagttgacagaggctgggcagcttactactgataaagggaagatggacaggctctacagaagagaatgatctagcagagggttcaaaggcccttgcaaaaactggggggaaccctcagatattctgcaaaacttgctttgaccatgcagttagagttgaatgtgaaatgaagaaaatagcaagttatcataaaattgatagaaaactcaagcatttttggcatttcaatttttgttcattttaacaatcagtatagggttgaacactgatttttgtgttttagatgattaaaaactctctcttcccaccacccctgccccaattattctccataaaacttggtcccattttaagtggagtctcactaaatggtctgtccctgaaaccagtgaacgtcagatgatgggaccccctatacttctctttagcatttacctcgaacactgaatacctacagtgctggtcagaaacaggtgatttaggcatgttcggttccctccaggaatctaacagggggacagacaagtcagagagtaatgagtgctctggggatataaacgaagcgctctatgaacagaagcggcagcaagtcatttggagggtggggggagaatcaaggaaggcttcattcagagaggacatttaagtagggccttggaagattttattaataacaaggaatgggaaaaaggcattccaggtaagggcacagcatgagcaaagacaaggagctgtgcaaagcacactgggagcttcacagagagatgcggctaaaatacacaggggaccacagggcaaacgggccagaagctggaaccaaaatttaaactaaggcccagtgttgagaacactgaacgctatggttaggcatttgaatgtgtccttaaacagccaaaggtccttgagcacgggtacccaggataaaaagcagtaggtaagatggacaggacagaagaaaacacagatggggcagtgaaacagggtaactcgctttgaacagaccaagtttaaagatgcttgggaactttaactggcacaacagtgtggcaaagaaagggacagacagttctgcagtgtaactaacaagactttgtaaccatctgggggaagggagagggaggacagtcagagacacttcccagcaaacagcaaggctgatccagacaccgtgcacaggcgggggtggggcaggcagagggcaaccaggcggggagggagaggcagattcctcggcagcggttaggaaaacttcacctactatagggtcaaactctgacctacaggggccaggcaggtgacaaatgaacaaagctggctacttctaagataaatgggaccatgaagactgtagtatggcccactggaaaccaccactcggctctagtggatcgatgccatgtgagaatgcaggccccaaagggccagatcatttgagttttcaagagaagccaaaaaaaaaaaaaaaatcagattagtgaaatctcccaatttttacagattgtgtgtcatcccacaaaacatttttctgtggaccagatttggcccttgggccacgtgtttgggacccccaaatctgtgtgcaactgaagagccactgtttggtggatcagccctaagatcagactgaaaacaatgagggaaaacggtccaaacaaaaggcgagcatctaaaagcaaatttaaaagccagaagcaagcaaagcacagtggagagagaggtttcagaaggaggggtgaaatcgcactctaaaatgtgagtgctgctgggtgccagaggcaggcagtgggccagcaaggaggcgaggaagaacatacctttagtgccaatccacagctggtcttgttctagtttaaaggtgagtctcacttttcctccagatttattgtacatgccggacagcggtaccgttggcaggcgctcctgaaggcacgagagaatggtaagagatggagggacagtcagaaaaaaagagaagggggccaagcgcggtggctcacgcctgtaatcccagcacactgggaggccaaagcgggcagatcacctgaggtcaggagttggagactagcctgggcaacatggtaaaaccccgtctctactaaaaatacaaaaattagccaggtgtggtggcacaccccagcctgggtgacagagcaagactgtctcaaaaaaaaaaaaacagggaaaaaagagaagggacaggattggaggaacctcaagtcagacggtggggctgcctcattttcagaatgctcacaaagaaatccgccttacctgggcccccttaacagatggcatcacatcttcaggttttcctttatccaacactttcctgtgttgctataagtcagaagagagaatgaaatgaaacagctgactacatttcgtcgtgttactattcccttgaaagagaggatgaagaaagccttagtgttttggctcaaaagcttttaatgacgacagactatggatcctttgaaactatagcacagtgctgtccagcagaactttctgggagggcgaatatgttcgtacctgtgctagccactacctactgctgtgactattacacacttgaaatgcagctactatgactgaggaactgaattcttaatttcattttaaccagccacatgtggatagctaccatattagatatcaaagttctacagcaaacgggatttccagattgccctcctcccctcaaaaaaaaaaaaaaaaatcaccactgaaatgattaaaccatcaaactaaagagggcgacaaagggtgttgctctcctagcagacaaaaaatggcacccacctttttcaacttaaacttccagagaacactataagatgctggtaatccgtctaactgcctaggaggagcagttcttcaacaaatggagacccagcccatcgccgaagttttccccactgccctacccttaactccagctaaacaggaacctggaagagccacctttcagaaagaaatgcttattactctataacctgacattaagaagcctctaaactccacccctaccacctgccccaagaactctgaggcagctctttaaggattctaagttcagggccccttaaacagttctcctgcctggcccaaatgcctgagtcttctttcttctccatctgtggccttataggcatagccactgcttggaaggctggaactaggggacaatgaatggatagaaggtaacaatttaatcaaatgtaagcactaggcagccacaagccagcccaaatcctcactggcatggtggaatccctctgggaggaataaactcagcactgccagactgctagcaaaaagtcactccagacatcacccccagaccccttaataagctggtaaaaaggcaagggactatatccctctcattaggtcatgtgatgcatcataattggcctcaatgaaacacagcagcatgggctggaagtacaattcgagtcacacctttcaagtaccttttgaacaagatttcctgtactgtggagaacagttctaagcctgttaagctaccattagtaactaaaaacctgtatttaggaggcatgttatgctccaagggtgtgaccattgcgaccactcctatctgacgtgctcacatttcactatttcatacatgtggcaaagaaaaacaggaatatgagaagaaactcaatcggtttcaagacactgagaccccatatgtgggggtgaagtctccaaatcaacaccttttagataattaatataggtttataaccccttatctgaaaccctagagttttgaactttcagggttttggaatttttataaagataatattgctttcaaatacataacaatcttctctgtggggtctggggcagtaccttgtcaccaaagaggaaaattcacactaattctggtcaggttttgctgttaaatttataaaaacacttctcgtttttatactcctttggggttttggaagcacacatgggggattatggatctgtaacacaaactgtgtccttttcttactgttggtcatatatcttagtgtctatggtcactaaatgatgttgattgaagtttatctactctacttcagacacagttgagaatacctgtcttccttggaacactaggaagaacgatcaggaggctacacagcaatcagtataatttgccaggtaaaaagataacaagtaatgattcttacaacctgttccttccatagtaaaataatctcacttttcctcgttacgtgaaagaatgttaatggctatgatgagcacaagacaaggcaggatctcttgcagccaaaagaacagagaacgtaaaaaaccaagctcctatttcacagatcaggacaaaaaaataaataaacaaatccatcagtgtagttgtcttcctactcagcttcatttagcttcctgaaacggtcagctttaggggaacctccgagagttgttgatttccatgcctagccaggcttgttgacttggggaaagccacaaaccaaaaagccaaatgtaagcacttgtacaaaatgagggcttacttctagtactggtagttttctctggcactaaataagagagagaaacccacgtctgattcctttcaacacatggtctgaagcctccctttaccaaggtcttatcctaaagtaggtagacttgagacacactgacccgccagatgagacaaagttgcaaatctcaggtagttgtcacctccactctgcggcacccaactgctgccataaatttccatcatgggccctgtccaaaaaggagcttattctagggagaatataaccagccacggctcaagaggacaaagcctcaaatttctcaagaccaagaagcacaagatggactcactttctgcctgcagagaggctccttcttgttctcttcggcctttgcatcctgctgcgcagcatctttgggtgtgtttactgctaaaacatcattgatggtggagccaaccaccatgatcttggccccactggtcacttttatttctctcaatgttttatcctcggggacgagtcccttatacatgactttctgcatggcaggcgggagaccttgggaaaaggtagaaggtggacagtgaaaggaaggaaggacagaaaaatgtatggatactacacagctctttggtaacagaccaaaaagtgaatactgcctccaccacctattagctttgtgaacttgggagatttacaacctctgaacctcagtttctagaactgtagaagatttattagagtaagtccttctgtacagacctgtttcaaggattaagagaccaatgcggggcatttagtacggtggctagcattgaataattgttcagtaagtactagctctcattctttccaagttgttcctcagtcatctaaatcattcacatattaagtgagaatccacaggcatcagagctacagaagccaatagggacaaaactcctgttcttaatggagattacaaggctacatgtagaaagctttaaaaaaaaaaaaaagttcaaggccaggagtgatggcttatgcctgtaatcccagcacttcgggaggccgaggtgggtggataaaataaaaaaaactagcccggcggggtagcgggcacctgtaatcccagctactcgggaggctgaggcaggagaatcgcttgaacctgggaggcggaggctgcagtgagccaagatggtgccagtacactccagcctgggcaacagagcaagactccgtctcaaaaaaaaaaaaaaataggaaaaagaaaagaaatctcagatggcaaagagctatgaacaaggtaaaattaagaaacagaatcgactgtgaagaaccagcatcaaagtcaatagcagcgtttcctaaacttcacttagaagaattacctaagatatttgctaaaaataaattcctggctacatcccagacccactgaatcagaatctcctgggaaagggcccagaagctgtaaaacaagcgccttaggtgattttttaattagagatgttagagcaacatcaatgagaaactggggcctaaacgtcagacttcggctttaatcccagctctgcaacttactagctctataaacttgagtctctttccccagctgagtaatgggcatccaagtatccttcagaagactgctgtaaggatggggggacctgatgcaaggaaagccaccaggtgcctagtagggtgcaagggccatcaggaggcggggtggggaagactggctgtcagcgccacaggaattacctgtaatcgagtggatcttctgtttcagctcggagcctgtgctgtccagggggaacttcacgtcatgcttggtcttattccagatgatcttcaagtccaccagctccctgcccgcgccgccgcccgcgtcttcgccgttgctgaccgaggcctgggctgcggggtccccagggggctgggccggggccggctgcaggctgcctcgtgcggcgccggagtcctcggccgccgcccccgccgcggcttcagcctccaggcagttgacgggccgcgcgggagcctcagtagccacagtctcggcctccgtgtccatgccaggttcctccatgcctgcaagggggttagggggtgggcgctcgccgcgggctgggcttgggaacggacgctgtccgggcgccgccggacctccgttcccgagccgcggttctccctcccgggccgggccgcatcccccagaggagcgaccgcaacctcagccccggcccggcgcccgccacccccgccgcactcaccatccggggccccggccgccgccatgatgattgtgtacaacacccaccgctcccgcagaggccgctgggaagaggcgagctggctgagattggcccccgcagcagcccctaatctctcacagcccggccggaaacaggtggaggtttctatggagacccgcctcctccgctcccaggtccggcccctgccacgctttcgctttcccaagctgaagggggcgggtccgggaaatagccctttctctggcctctgccccctggtggcgagtgcggccgcagccgtccaggggggcgtgggatttcgcgctagggggcctgtgactttaaggggcaaggctgcgctggctgtggcggaggccgattggctggaagcagtccccggaagtgacgcagggagaagcccacgtgtgctattccatcccacatggcggcgctcctgaggagactgctgcagcgcgagaggccttcggcggcctctggccgccccgtaggacggcgcgaggccaacctgggcactgatgccggggttgcggtgcgagtgcggttcgctcccagccccacaggtaaccctggcggacgtgacgctacaggccgaggccccctgtcccgtctccgccccacgaatgttcccgaatgaatcctttccggtggtgtcagagtgggcgggcggaggagggttaaggcagcgcgagcccattttacagaggcggaaactgaggtgcaggagcggaaataattcaaattgccaggagtttcttgtgttttttgtgccatcccatctctttcgatctttttttcatgcattccatacatgtgcattgatgacaacctgtgtaacaggtgttgtagacgctgggatacagtgatcattgagaaaggtaggggccttgctctgtggaagtctgcattctagtggctgccgcagacacttataaaaaataagtgtaattttagagtcacatgtgccatgcgggaagtgaaacaggataggagactggggattaagaaggacgctccagaaggctttactgagcaggtaacatttgagctgagatccaaatgacaagaaggagcacgctatgtgaagcctatagaaggaaccttctggaggccaggcgcggtggctcacgcttgtaatcccagcactttgggaggcagaggtgggtgcatcacttgaggtcaagtggatcacttgagagccgtctgaccaacatggtgaagccctgtctctactaaaaatacaaaattatctgggcatggtggcgcatgcctgtaatcccagctacttgggaggctgaggcaggagaatcgcttgaacgcaggaggtggagattgcggtgagccaagatcgcgccattgcactccagcctgggcaacaagagcgaaactgtgtctcaaaaacaaaaaagaaggaaccttctgggtagaggaaatcgcaggtaccaaggcactgtgctagtgctgttgggagcttagcaagctagagggtgacagaggcccattgtatagcctgttggagatctcgtcagggccttttggttcccaccagtaaggctaccttctacgttctctacacggagtatgcctctcatcccaaatcccaggatgaacatacaaagatctttgtagtaaaatcccagctatacatgacaggatctttctggcaggcagtatagcctagagcagtgcctttcaaaccatctgttgtggaagtgctggttttaaatttccaatcaattgtgtatcaatatttgcacaaaattaatataatgaccagaaaaataaaattttgaaaacatccaaaatacaaaccaatctcattttatttgggttagcagaggtaaaatcattctgccagattgctatgtaagtttcgcctggccaatatggcaaaaccttgtctctactaaaatacaaaaattagccgggcatgtggcccaggcctgtaatcccagctactcaggaggctgaaaatcgtttgaacccaggagaaagaggttgcagtgagccgagatcgtgccaccgcactgcagcccgggtgacagagtgagactccatctcaaaacaacaacaaaagtttctaaacctttactctcagtttctgtacttgattgtgaactgacaactgttttcagaccagcactggattgcacactttgctttgaagagcacttatgtagaatgccaaagcctgggattgcctgggtccaaatttctgtcgtggccacttattagatgtgtaacttactagatgtgcaaattattattgttattttgagacagggtttggctctgtctgtcgtccaggctggagtgcagtggtgcaatctcggctcactgcaacctcagcctccggggctcaagtgatcctcccacctcaacctcccgagtagctgggactacaagtgtgtgaccactacgcccagctaatttttgtattttcttgtagagatggggttttgccatgttgcctgggcggatcttgaactcctgagctcaagtgatccacctgccttggcctccgaaagtgctgggattataggtgtgagccatcacacctggcctagatgtgcaaattatttaatgaatctgagcctcagtttcaccatttgtcaaaacggggctaataataatatctgtcttatggggttaagctcatgcagccgaaccacttagtaaggtctagtacacccagaaagcacttaatacacagcctctattatgatgattgtacttctcatttccttgctcatttgcggggaaagcccatgtgggaaaggcttttgactataaacagataaaagaattatcaggcacagatcattacagtagctgaaattaattgagggtttactttggtcagcatttagacctcagagcaaccctataataaagaaggttcttatttttttgctcttaatccctctgacagatgaggaaatagaagctcataaaagttaagtagagttccttctcaaggggtagcaactaataaatggtggatgcagaatttgaatccaggtgtacttgatgtaagaggctttgttttcagcagctgggttcctcttttgtcttggggactcgtgggactcagtgccactgaataccactggttttctggtgtccttgcagtaactatccgaaggttacacacatcagtgttgaagcagggtcggcctggccccagaagagctttttctctcctctgctgcctcttgtacttgtaaatgtagatgagctcattgtggagacttagggctgtgggctggtccgaagaaggtacggtaagaggtaatgacaactctggaaaagctgttaactttcagttttcagacaggaatgatgaaaaaggcaaatcttaggagtttaaactgatgaagagaaatacagtggaatcaaacactacttttggttagtgtttaaagccagcaattagggtgaaaatcttggcaaggcatggtggctcatgccagtaatcccagcactttgggaggctgaagtgtaaggattgcttgagcccaggagtttgagaccagcctgggcaacatagtgagaccttgcctctgcaaaaaaaaaaccaaaaaacaaatattagccgggcatggtggtgtacacttgtagttccagctacttgggaggctgacgtgggaggattgattgagcctgggtggttgaggctgcagtgagccgtgactgtaccactggacttcagcctgggcaagagtgagaccccatctcaaatttcaaaaatgaattttgtttctttaaaaaagtaaaaatctcaagtagatgaaatttaaaatgtacgacgtggacagtcatgcacactgcatagactgcatatgcaaaatgtgattttttttttttttttggagatggagtctcgccctgtcgcccaggctggagtgcaatggtgcgatctcggctcactgcaacctctgtctcctgggttcaagcagttctcctgcctcaacctcccaagtagctgggattacaggcgcccaccaccatgcccagctaattttttttgtggtatttttagtagagacggggtttcaacatgttggccaggctggcctcaaactcctgactttgtgatccacccgcctcggcctcccaaagtgctgggattaaaggtgtgagccaccatgccccaccgattttttttttctttgtagagacaggatctcacaatgttgcccaggctggtctcaaatttagagacccaggtgatcctcgtgcctctgcctccaaaagtgctgggattagaggtgtgagctactgcacctggcccacaatatgattgtacagtattttaaatttctagtttgtttgtaattaatttttttcccagcgcacatcattgaatttctgtaagttaaatgtacatgatatggcctcaatgaataactctctgcttctctttcaggcgaaacttggccttgagacaaatatcaaaatagagtggtggatgcagttggggaaaattggagccttttaataaaatgacatgctccaaatcctgggtggtttccattttcaggatgagggattaaatgtgtctggagacagggcacaggggtaactagttcttagtctttgaaaaaaaattttttaatttttaattttttttgtttgagacagagtctcactctactgctgcccaggctggagtgcagaggcgtgatcatggctcgctgcagcctcagcgtccccaggctcaggtgatcctcccacctcagtaactgaaaccacaggcatgtaccaccatgcccagctaaatttttatattttttgctaagacaaggtctcaccatgttgcccaggcagatctcaaactcaggccaagcacaatggctcacgcttgtaatcccagcactttgggaagccaaggcagatggatcacttgaggtcaggagttcgagatcagcctgaccaccatggcaaaatcctatctttactaaaaatacaaaaattggccaggtgtgatggctcttgcctgtgatcccagcacttgggaggccgaggctggggggatcacttgaggccaggagttcaagaccagccttgccaacatggcgaatgcctgtctctaccaaaaatacaaacatgtagctggacgtggtggcacacacctgtaatcccagctactcgggaggctgggcatgagaattgcttaaacacaagaggcagaggttgcagtgagccaagactgtgccactgcactccagcttgggtgacagagtgagactcttgtcttaaaaaacctacaggaacctcctgggctcaagtgatccccccggccttggcctcccaaagtggtaggattacaggcgtgagccaatgtgtcctgctggtcttttaaatttattgcaacattctgtcacagtagtgcttacttgccccttgctgaggcctattagcttatcttccctgtcttatctgagctgttctcttctccaggcttcttgcacctgggtggcctccgcactgccttgtacaactacatctttgctaagaagtaccaggggagcttcatcctgaggctagaggacacagatcagactcgcgttgtgcctggggcagcggagaatattgaggacatgctggagtgggcaggtaagcctggcagagaaaggatctttctgcagggaaggaacaggaagcaggaaaaggagcctgtgggtcttctcatggagttctgagtggaaaatggggagttcctggagaagtggctacatttgtactgccctgcccggggtggcagatgacacctgaaaaaatgccgaagctctctgaaacacagctccaagactggtttctttatttttatttatttattgtttttgagacagagtcttgctctgttgcccaggctggagtgcagtggtgcgatctcggctcactgcaagctccgccttccgggttcacgccattcttctgcctcagcctccaagtagctggaactacaggcgcccgccaccacgcccggctaagtttttttgtatttttagtagagacggggtttcactgtgttagcaaggatgatcttgacctcctgacctcgtgatccacctgcctcgacctcccaaagtgctgggattataggcatgagccaccgcgcccaacttggtttctttattttttaattttttagagtcagggtctcattttgttacccaggctagagttccatggcacaatcataacttactgtagcctcgacctgggctcaagtgatcctccaccttagcctcccaagtagttgggactacaggcacgcaccaccacgcctggctaatttttaatttttttgtagagatgagatctcactgtgttgcccaagctattctcaaactcctgggctcaagcaatcctcctgctacagcctcccaaagagctgggattacaggtgtgagccactgccaaggctgttttgagattcctgttttcacctcagaatctcaagttcattccctacaggggccaggcaggaaacacagggccaagtgggaactggaggagctgggccagtgctgagctgtgaaaaccacacctcatccagagttgggagtgcctctgagctccagctccttgtgcccatgcgggaatgctggcccagcttgtccaatcctctgagttgcaagaggagccagaaatccagtttttctggatgaatacttaaccattattaaatctgggctcagattttttttaaccatgttgtataagccacacaaaacacgtacagcttctgaagttgatcttgtgggaagttttatcctgaggacagctaaggtcagggagaacaaagaggagtgtgtttccttttcatgggtcgacagttgtctacctgtatggacgggtgtgactaggaaaggggagattcccaaggaaaaataccaagactctgctagtctagagattgaaaaaaaaagaaagaaaaaccccaagactattttgagatgtgtgttctaatctcaggtaaattactcactaaactctggattcctaaagagtataaaatggttggccgggcgtggtggctcacgcctgtaatcccaaaactttgggaggccgaggctggtgcatcacgaggtcaggagatcgagaccatcctggctaacatagtgaaaccccatctctactaaaaatacaaaaaattagccaggcgtggtggcgggtgcctgtagtctcagctactcaggaggctgaggcaggagaatggcgtgaacccggaaggcggagcttgcagtgagccgagattgcatcactgcactccagcctgggtgacagagtgagactctgtctcaaaaaaaaaaaaaaaaaaaagaccatgtgcttagtgccaagggaaaagacagatgagtggattaattatttctttttttttttttttaacaaacaaaatcttgctctgttgcccaggctagagcgcagtggttcaaacacagctcactgtaatctcaaattcctgagctcaagggatcctctcaccttagcctcctgggtagctggcaccatagctgtgtgccaccatgcccagctaattttattaacttatgtttttgtagaggtagggtcttgctatgttgcccaggctgctgttgaacccctgacctcaagttaattctcctgcctcggcctcccaaagtgctggcatcacggtcatgaaccatcgctcctggctcctaattcattcttcataggatactaaatgataataaccagtatggagaaaagagtaacaggcttagaaactagggcgagggatgcccttgtagatagggcagttttctcttaggaggtgatgctggagcagagacctgcatgaagtgaggagccagccccgtggtgacctgggggaagaatgttcaaagcaaaaagaatagccaatgcagaggccccacagcaggagtgttctagatgtatttgaggagcatcaaaaagaccagcttggtctaaccatagtgagcagaatgaccagggatgtgaggatagaaggcttgccaggtcgggcacaggggtacacgcctggaatcccagcactttgggaggccaagaagagaggatcacttggacccaggagtccaagaccaacctgggccacatagtgagacctcatctctacaaaaaattacccaggtgtagtggtgcactcttatagtcccagctacttgggaggctgaggtgggagcatcacctgagcctggggaagttgaggttgaggctgcagtgagctgtgatcatgttacagaattccttcagtgccactttgccagccagaaatctctgcagctgccctcacctctgtcggggcctcgcttgggccttctgggcccatttggcccagcaggctgcacttggctcatgcccacttggatcccacacctgccatggctccacactcagcccatggctggactgggtgtgccacgagtggcttctgtgttgggtgctggcatctagatgaggggaacatggtggcacccaaaaacttgggaaataccatcagttgtggagctccaaggggtgttatagctcttgtttggggagtcctgagatctgagtccccagcactgtctcagctcttcactcctgtagcttggtgagtgggagcgtgttacagctctctttctcctgtagtctggtgagcgggagcgtgttacagctcttttattcccgtcacccgcagcttggcgagttttgggttcttgtcctgcaaccaagaggaatgaggtgtgcaggtaccatagagtgagtaaggcagagaagaattttattgaatgacagaagggaaactctccactgcgagaggggaccctgaaagtggtagccatctgtgaggctgagtctatcatttttatgggcttagaatgggggcatgcctgccgattggtccatgagtggtcttggaaaaaggaccattcagttggttaaaacatcatccggaaggaaccaatcgagagagtgggtgagacagggaaacaagttctcactccagtcatggactctatcctgacttgacagtttggttttcaggctgtctttggcttagaagtcagatttcaccagggacctgtccctgactgcctaggaatttgtctgtctcctgtcagtcatgccattacactccagcctggagcgacagtgtgagaccctgtctcaaaaaaaaaaggctttccaggagccagattacatggtgcctcacagaccaagatgaaggcttcagtttcacagaggatctgctacttatcaggtaccacgccaggcatgagggatacagtgatgaacaacggtgatggtggcgggtcccaccctcgtggaattcctggggcagcatcattgtgagaatgaggcttgcagcccagagcttgtcccccaccctggtgttttggcgaggcagagggcaggtattcaggcacctcatggtggctgacttctggagcaccttactttgggagtcattctttcttttttaatttttttcattttatttatttatttatttatttatttatttatttatttattgagatggagtctcgctctgtcgcccaggctggagtgcagtggtgcgatctcggctcactgcaagctccacctcccgggttcatgccattctcccgcctcagcctcccgagtagctggaactacaagtgtctgccaccaagcccagctaattttgtttttgtatttttagtagagacggggtttcactgtgttagccaggatggtcttgatctcctgacctcgtgatctgcccgcctcagcctcccaaagtgctgggattacagacgtgagccaccgcgcctggctattattattatttttttagaggcggtgtttcaccatgttgcccaggctggtttcgaactcctgagctcaaatgatccacctacctcggcctcccaaagtgctgggattacaggcatgacccagcatgcccagccttttaaaaataatgacatataagcaaggcgtggtggctctcacatggggtggctcttgtctgggcaggcggatcacaaagtcaggagttccagaccagcctggccaacatgttgaaaccctgtctctaataaaaatacaaaaattagttgggcgtggtggcacatgcttgtaatcccagctactcaggaggctgaggcaggagaattgcttgaaccgggaggtggaggttgcagtgagccgagatcgtgccactgcactccagcctgggtgacagagctagactctgtcttcggggaaaaaaaaatgacatataattcacatgatatgaaatttaccatatcaaagtgtacaattcagtggttttcaatatatttactgtgttgcgcaaccgtcaccactaattccagaacatttccatcacccctaaaagaaactcttccttattagcagttgttttccattctaccctctcctaccacctggcaactactgatctctttctgcctccatggatttgcctcttctggacgtttcatatgaatgagatcatataatatatggccttctgtgactggcttccttcacttaccataagcgcatctgtgggctatcatgcttcattcctttttatagccaaataatattcatcatatggttataccacattttgtttattcatcactagtgaatgagcattttagttactctggtttttggctgtccaataaaactctatgaacatttacatgccagagtttaagttaacatgttttcagttctcctaggggagtccctcttaaaccctggggcattccaagataccacattaaagagacttgtttagcattagatcaggaagggatccccccaaatttacccgatttagccctcctttctgacaaatgaagaaatggaggtcccatgagagggagccaagtaacactgataatcacagatggctgggtgccatggctcacgcctataatcccaacactgggaagccgaggcaagaggatcacttgagcccaggagtttgagaccagcctgggcaacataggcagaccttgtctctatagaaaacttaaaaaaagttagccaggcctggtggcatgtacctgtagtctcagctacttgggaggctgaggtgggaggatcacttgagcctgagaggttgaggcttcaattagccgagaacgtgccactgcactccaacctgggcaacagagtgagaccctgtctcaaataaataaatacataaataccaaagcatagagagcaccggtcacaggccacttgatgagtactttacttagatcatcttactctagtctcatgatgatcctcatgagaaagttactacttgtttccttctttgacagatgagaacccagagcccagaaagatgacttgcccaagatctctgagctggctggtacgtttgaacccaggcccactcagctcagtttgtgttagcattgagggtagcaaggtgaacaatgtccttatcttcccaattcctttgaaagctctttgagggcagaaacaccatcttccagttcttgtgtccctgtgccctctcctgaaagcattcataatgaaatttatcctatgtaatcggagggaattggactttgggtttggggtttggcttacagtagatcatatttaatctattctatagcatatattgaaactgtcctaaatatacaccactgggctaagtgcttataagcactgacacatttgttctcacaattccctctgcacaggaggctgctagctccacttttcaaaagaggaaactgaggcttagaaagattaagtctagctgggcatggtggcacattcctataatcccagctactcgagaggctgaggtgggaggatcacttgagcctagaaattggagactgtagtgagctatgattgcactactgcaccctagcctgagtgacacagcaagactcgctctctactaaaaaaatagccagatgtggtgatgtgcacctgtagttctagctactcgggaggttgaggcaggagggtggcttgagcccggaagttcgaggctgcagtgtgctatgatcacaccactgcactccagctgggtgatagagtgagaccccatctcttagaaaaagaaaggctaagtaacacaaacagcagtgtaatgagtggttaagaatatcggctccggtgcccattagtctgggtttgaagctgatcgtgccccttctactcggccaggtgacaaagcatctctgtgcctcagtgtcctcacagagtgggggaataaccgcacctacctggtagggtgggtttgaggcttcagggaaaagtgtcttttatggcactcagcaccctggtgctcacacgttggtagcacctcaggatcccttgtcacagctactaagtggcagagccatgagtcccaccagggcctgatgggctgttctctgaaccatgcttttttctcctaagtcagctgttcccaggcctgggcttgtttctccctctccagggaatcccatcagggattgagaggacatacaattagggatgtggactttggagcccgtacacctccgtttgctccttagtccatgagcccatgcgactttgagtgcttcacctctctgtgttttaacttttcatctctaaaagggacattgggccgggtgcagtggctcacgcctgtaatcccagcactttgagaggccgaggcaggtggatcacctgaggtcgggagttcaagaccagcctggccaacatggtgaaacgctgtctctactaaaaatacaaaaattagctgggtgaggtggcacatgcttgtaatcccagctattcgggaggctgaggcaggagaaccgcttgaacttgggaggtggaggttgcagtgagctaagattgcaccactgcactccagccttggcgacatcagagcaagactctgcctcaaaaaaaaaggcggcggggaggacattgtactaatgccaacctcatggattgttatgaggattaaagctttaatatgtgcataaagtgcttagagcaatgcctgagaacgagcgctgtgtgcaccttagctgtcattattccctgtgttccaggcatcccgcctgatgagagcccccgccggggcggtcctgctgggccctaccagcaatctcagcggttggagctgtatgcccaggccacagaagcgctgctgaagaccggagctgcttacccctgtttctgctcaccccagcggctggagctcctgaagaaggaggccttgcggaaccaccagacgccccggtaagaacctcagcttgttgcagatgcctcatcaacattgggtgtgtttgttaccttgtgctgcgtaagaaattcccctaaacatgtattacctctcagtttctgtgggtcaggcatctgagcgtggcctcacctgtttctttggctcagggattctctcaaagccacaagcaactacaggtcctagccagtcctggagttctcttaaagcttagcttggggaagatctacttccatctcctctcagaaggctattggccaacctcaggtccttgctagctgttgcctggagacatcagttctttgccatgcgagcctctccatagagcagcttacagcgtggcagccagcatttctcaaagccagccaaggagagagtgagcacgtacgagctggagtctacctagttgtggaagcaacttctcaccacttttgttttataggctatgtattccttctctggaacgcttgggaccagaagtgttttggatttcagattttttgcatattgaaatatctgcatatatataatgagatatcttgggggtgggacccaagtctaaacatgagattcatttatgtttcatgtacgccttatacacataggctggaggtgattttatgcaatattttaaataattttgtgcacgaaacaaagttttgactattttgactgtagcctgtcacatgtgtttgggtgttgtattttccacttatggcatcatgtcagcactcaaaaggtttcaaatgtcagatcagttgtggctttttttttttttttttgagacagtctcactctgtcgcccaggctggagcgcagtggtgcaatcttggctcactgcaacctctgcctcctgggttcaagcagttatcctgcctcagcctcctgggtagctgggactacaggtgcccgccaccacacccatttaatttttgtatttttagtagagacgggtgtcactgtgttggccaggccaacctcaggtgatccacctttctcagattcccaaagtgttaggattataggcgtaaaccaccgtgcccagccagatcaggttttttggttttttttttgttgttgttgttgttgttttttttcatagagtcagggtcttactttgtcacccaggctggagtgcaatggtgtgatgttggctcactgcagcctccaactcctggactcacgcagtgcccccatctcagcctcccaagtaactaggactgtactcctggctaatttttttttttaaacttttcataaagatggggatctcactatgttgcccaggctggtcttgaactcctggcctcaagcaatcctcccaccttggcctcctaaagtgctgggattatagatgtgagccactgcacctgacttttttttttttttttttttggtgagacagagtcttgctctgctacccaggctagagtgcagtggtgcaatctcagcttactgcagtctccacctcccgggttcaagggattctcgtgcctcagcctcctgtgtagctgggactacaggcacatgccaccacacctggctaatttttgtgtttttaatagagagagggtttcgccatgttgcccaggctgttctcaaactcctgaactcgaacaatcttcccacctcagcctcccaaagtgctgggattacaggcgtgaaccactgcacctggaccattggagcatttcagattaggcatatttggcattatttttgttcattagacaaaagtcactaggcccagcccacactcaaggggaggggactacacaaggacagaaacaccagaaggcgagaatgactggggctatgttagaagccaagatttggtctcagaaagtaatgtgtaaagtaattttaattatttgttatttttaatgagcaaggtccacaggccggacgtggtggctcacgcctgtaatcccagcactttgggaggctgaggtgggtggatcacgaggtcaagagttcaggaccagcctggccaatgtggtgaaaccccgtctctgctaaaaatacaaaaattagctgggcgtggtggtgcgcatgtagtcccagctgctcgggaggctgaggcaggagaatcatttgaacccaggaagtggaggttgcagtgagccaagactgcaccactgcactccagcctgggcgatagagcgacactgtctcaaaaaaaaaaaaaaaaaaaaagaaaaatgaaaggtccacaaagggccaagtatggtggctcacgtctgtaattccagcactttgggagggcggaggtgggcagatcacttgaggtcagaagttcgagaccagcctggccaacatggtgaaaccccatctttactaaaaatacaaaaattaggcctggagtggtggctcatgcctgtaatccccgtacgttgggaagccgaggtgggcagatcacctgaggtcaggagttcaagaccagcctggccaatatggtgaaaccccatctctacaaaaatacaaaaattagctgggcatgatggcgggtgcctataatcccagctacttgggaggctgaggcgggagaataatttgaacctgggaggcgaaggttgcagtgagctgagatcatgccattgtactccagcctgggcaacagagcaagactccatctccaaaaaaaaaaaaaaattagctgagcttggtggtgcacgcctgtaatcctagctacctgggaggttgaggcactagaatcgcatgaacccagaaggtggaggttgcagtgagctgagattgtgccattgtactccagcctgggtgacagagggagactgtctcaaaaaaaaaaaaaagaagatccacaaagatatatattgaaagaactctcttccaatcttgactctggccactcaattctgctctccagagataaccagtgttaaaattttcttatgtctcctccagagacattcagtacatatacctataagtacatattattttctctttttccttattcacatggtagcatgcaatgtactatgtacatgctatgtggtgcaatttaccatgtccgcttaccatcttgaggatcagatatcagtccataataatgcataatattccatttgtggatataacttcatttacttaatcagtttcgtcttaacaaacatttatttttgttttgttttgttttgttttatgttatgttgtgttattttagaaatggagtcttgctctattccccaggctggagtgcagtggcaagatcttggctcactgcaatctccatctcccaggttcaagtgattctctggcctcagcctcccgagtagctgggattacaggtgcccgccaccacaccctgctaatttttgtatttttttggtagagatggggtttcaccatgttggtcaggctggtctcaaactcctgacctcaagtgatctgcccaagtgatcctcaagtggcctcccaaagtgctgggattacaggcatgagctacgacactcggccttaataaacctttatgttatttatttatttatttattttttggagacggagtcttgctctgttgcccaggctggtgtgcagtggtgtgatcttggctcactgcaacctccacttcctggatacaagcaattctcctgtctcagcctcctgaggagctgggactagaggtgcatgccaccacacttggctaatttaattttcttttatattttagtagagacggggtttcaccgtgttacccaggctggtcttgaactcttgagctcaggcaatccacctgcctcggcctcccaaagtgctaggacgagctcaggcaatccacctgcctcggcctcccaaagtgctaggactactggcatgagccactgcgctcagcccaaacctttatgttatttctaatatttggttataaaagaagagagctgtgatgactaatgttgacatatgtcattttgcacttgtgcagtatgtttgctgaataccttcctagaggtggaattgcagagtcgagttgtagctttgatggatactgccaagtggctggccctttacttgtttacactcccatctgcaatagcattgtaacatttacattgcagttccagtgaactatttggtcaagggctcagctgtttggccaaggtcatgacgtttacggtgacattgcctttttattataaacaatgtatttgtctcttgacagaatattttttttctcatctcattctgtgacccaggctggagtgcagtagcatgatcacagctcattgcagccttgaatctcctgggttcaagcaatcctacatcctcagcctctcaagtagctgtgaccacagccatgtaccaccacacacagagtgttatgttttgttttgttttgagatggggtctcactctgtcacccagattggagtgcagtggtgtgatattggctcaaggcaacttctgcctcctgggctcaagcagtcctctcatctcagcctcccaaacagctggaaccacaggtgtgtgccgccatgcccggcaaattttttttgtattttttggtagagacggggtttctccgtgttgcctaggctggtctcaaactcctgagcataggagatccacccacctcagcctcccaaagtgctgggattataggtgtgagccatcatgcccggctggcacacagctagtttttaaatttttgtagagatggaattcccctattttgcccaggctggtatgaaactcaagcgatcttcccacctcagcttcccaaagtgctgggattataggcatgagccaccatgcctggccaacagattttttttttttgttaaattatagtcatgccctgttgtggaatccttgcagccatttatttatttatttattttaagctttcaggatttgtattaaatcctagtctaatttaacggtatctgatgttacacacatcatctcatggtgaacgtgtttaataagcgaaagcaaatcagacagcttatctaagtcgttattttttgtggactaaacagtaaggtaacaactacccagaaccctatgggtcatgatggacacttgctcagttttcatacaagctgtgttggttatcaaagtatatctgctaatatttaataaagtgaaatgtcattggggtggaaaagtcaagcctagacatttggttggaaaagaacagatcaagtatggatttcacaaaccaaaagtttataaactcaatgcaatacaagtcctttctattgtaaaagcttagttgaaactaaaagatctgtaaaaactattactttgggccttaaacagtactagctcttatgagcaaaaaaaggacacaactgcagcctgggcaacgtggtgaaaccctatctatattaaagtacaaaaattagctgggcttggtggtgtgtgcccataatctcagctacttaggaggctgaggcaggagaatcagctgaactagggagatggaggttgcagtgagctgagattgtgccactgcactccagcctgggagacagaatgagaccctgtctcaaaaaaaaaaaaaaaaaaaaaaggaggggggccataactgttgagaatgtattacttggttttattttacattaggtggtaggtacaaagcaatccttcttaataaagctgacagttagcttcccttaggacttttttttccagacagggtcttgctgtgtcacccaggctggagcgatgcaatcatgactcaccacagccttgacttcctgggctcaagcaatcctgcttcagtctcccaagtgggtggaactacacacatgtacccaccatgcccggctaattctttttttttcttaaatttctagtagagacaaggtctcgttacccaggttggttttgaactcctgggctcaagcagttctcctgccttgtcctcccgaaatgctgggattacaggagtgagccaccgcacttggacagaacatattcaataatgcacatttaaaacaagtattcatcttacaagttgttctgtaatccaaacatatgacagcttggagaacaacatttagaaaacagaagccaatgtaaaaagacagattaatacaactagaagccaggcacggtggctcacgcctgtaatcccagcactttgggaggctgaggtaggcagatcacctgaggtcaggaattcgagaccagcttggccaacgtggtgaaaccccatctctgctgaaattagctgggcatggtggcgtgcacctgtaatcccagctacttgggagcctgggaggcagaggctacagtgagccaagatcacgccgctgcactccagcctgggtgacagagcgagactccatctcaaaacaaaaaacaaaaaaacccaactaggatagtgtaggttttgtatggctcagactttacagttttcttactgcatcatcaatgtatcgattagaatatctgttccagctaggtgcggtggctcatgcctgtaatcccagcactttgggaggccaaggtgggcagattgctagagcccagccttcgcaacatggtgagcccccatttctactaaaaaaaatacaaaaattagccaggcatggtggtgcacgcctgtagtcccagctacttgggaggctgaggtgggagaatcactttacccttgggaatgtctaggctgcagtgagctgtgatcactctactgtactccagcctgggtgacagagtgagaccctgactcaaaaaaaaaaaaaaagaaagaaaaagaaaagaaaagaaagaaaccctgtctctactaaaaatacaaaaaattagctgggtatagtcgtgcatacctgtagtcctagctgctcgggaggctgagatgagagaatcacatgagcccaggaagtcaagactgcagtgagccatgattgcaccactgcattccagcctgatcaacgagagtgagaccttgtcccctgtctcagtaaatgaatgaatgaatgaatgtttcttcagctggccccattgctgtggatttaaagaaataccttttcttcctggttttatttaacctttgagatccatccaataatctctaataccatcaattagcacttcccctttaacatcccaaacactaaggtacctcattttcccaatctgaaacatgttatcagctgagtacagtggcctgtaatctaatcacagcactttgggaggctgaggagggtggatcacttgagactaggagttcgagaccagcctgggcaacatggtgaaaccccatctctatatgaaatttaaaaaagaaaataaacatgttattatgtttactgccgctgctctgtttggaagatgacagagctcccaaagttttgccagtcttttgttcctttacaagtttttctggagcaacttactttttcttctttaactttttgtcaaactcactgtcagaattcctgccagaagagcttgaagaaacaagttcctttgattcagacataatgctgccctgcttctgcagctgaacaccctcctgttcactcatgtgcaactgactcatttgtaaaaatttcttttttggccgggcacggtggctcacacctgtaatcccagcactatgggaggccgaggcgggtagatcacgagatcaggagttcgagaccagcctgaccaacgtggtgaaaccccatttctactaaaaatataaaaattagccggttgtggtggcaggcacctgtaatcctagctactcaggaggctgaggcaggagaattgcttgaaccctggaggtggaggttgcagtgagtcaaggtcacgacactgcactccagcctgggtgacacagcgagactctatctcaaaaaaaaaaaaaaaaaagaaaaaaaaagttttttttttgagacagggtctcgctgtgtcacccaggctagagtgcagtggtgccatcatagtttactgcagcctcaacctcctgggctccagtgattcttccaccttggcctcccacagagctgggactacaggaatgcaccaccacacctggctgattttgttttgttttgttttgtagagacagagtctcactatgttgcccaggctggtattttaaatttttaaataagagacaggattttgctatgttacccacgctggtcttgaacccttgaggtcaggctgtccttctaccttgacctcccaaaacactgggattacagacgtgagcaactgtgtccagccctgtgcaccatttattgattgattgaacacttagctgtggcaaagactaaccttacaagcattccatctgtgtctcagaacgcttttgggtgcagttagtggaataccctgttagaagggacaaacgatactttaactcacagatggatcacctggggacctagttaatgttcagattctgactcagtaggtctggggtggagcctaagagtctgcatttctggcagactcccaagaggctgatgctaggggcccacagaccacactttcagtagccagggcatcaatcatagacatttgtcttttgattctgcacaaggctggaggtgggtgactccaggatgagactagcagtgtagagacaccagggctctattttggcttctctctgacttcattgccttccctcctgcagttgcaagtagctgccgcaggtccaagcatgctccccttacaggacaacatccaaagaggacagaagtggggcagtgggaaattttaagaagggattttcctcctgtggctttctcttcttgtcctttggagagaaaaacctttcccggaaccttaaacctttcttactccccaggcatgcttttctttgcatcccagtgactaggatggggttacattcctgcctggactggtcactggcatggagcaataggattgcaagattggctataccaatcaggattcaacccctcggactaagcattttgctattttcttgttagcaaggaagaagcgtggaatggctggtagataggcagacattagtgtctgctacaccatgttatctcagttttccacacaactgtaccatcatccctgttatagactgaggaagcagcttgcagcagtaactgacttgcttaaggtcacacagctatgacagaggtaggactcctgtccatcaacctttccatcaacagtactcatgctgctctgctccccatcaggtatgacaatcggtgcaggaacatgagccaggagcaggtggcccagaagctggccaaggaccccaagcctgcgatccgcttccgcctggagcaggtggtgccagccttccaggacctggtctatggctggaataggcatgaagtggccagcgtggagggagacccagtcatcatgaagagcgacggcttccccacataccacctggcctgcgtggtggacgaccaccacatgggcatcagccacgtgctgcgaggctctgagtggctcgtctccactgccaagcacctgctcctctaccaggccctgggctggcagccaccccacttcgcccacctgcccctgctcctcaacagggatggcagcaagctctccaagaggcaaggggacgttttcctggagcactttgctgctgatggcttcctgcccgattccttgttggacatcatcaccaactgtggctcaggttttgcaggtacgtgcccacctgaatagtcctggcagcagagagcatggccaggaggagcagggctttggctcagacagtcctgctctttggtcccagctttgccacctaccagccaggtgaccttggacaagtttattcttttattcaataaatgtttattttgccagacaccacattaagtgctggggctacagtagtgggtgagatagacatgatccctgccctcaagggacttatagtctctgagcctcagttgcatatctggaaaatggggataagtgtctacctcattgggttaggattcactgagctcaggagtgtaaggtacccagcccagcacctgtcacactgtaagcacaaaaaatgacagaccctatgattgtgacaattattacaagcatgtatgctaacagtatgactagaattaatatggatttagtttctttttttccttcttcattttactgccagatgaatctagtttatttcaagctgagcacttacccatggtccaagacttagacccaaaccttgaagaagcaagcatcaaataggatgacctgaaggatttctgaaaatgtgtccagaatagcctgcctgctggtctcatttcatttaacacaacatactattaaggggtagatacatatctccactgtttgtaagaggattgtgaagctcagagaagctgagtaacttgccaaagtcacacacctagtgagggatatagcgctttaggcctatgcctgatcacgatgcctgctgaccgtatgggactgagctgctgctcacaagaagcagctcccagcactacggttcttaactttttttttttttttttgagacagaacttcttgtcccccattctggagtgcaatggcgcgatctcggctcaccgcaacctccgtctcctgggttcaagcgattgtcctgcctcagcctcccgagtacctgggattacaggcacccgccaccacgcttggctaatttttgtatttttagtagagatggggtttcaccatgttgtccaggctgttctcgaactcctgacctcaggtgatccacccgccttggcctcccaaagtactgggattacaggcgtgagccaccgtgcctggcctggttcttaactcttgatcgtgctttggaatcagctaggaagcttctaaaatatgctcagaccccaaccaaacccagttgactcagagtctctggtacagccaggcaatgggcgtactgttctgcagctcgtgtcttgagagtaatggagatgggtttagcctgattgttttcagacctttttttctttaatgatggaaccctttctgaaaatgaaagctcattcaggctcttgatatataaatagctagaagttaaatccctttgggcaaagtggaatggggggcccagggcttgctcactcagcctcccttatgtttgaaagtagaaggagggcgggcacagtggctcatgtctgtaatcccagcactttgggaggccagtgcaggaggatcatttaagcctgggagtttgagaccaacctgggcaatatagtgaaactccatgtctacagaaaaatgtatgtatgtatgtgtgtatgatgtatttatttgatagagtctcgctctgttgcccaggctggagtgcaacggcacaatcttagctcactacaatctccgcctctcaggttcaagtgattttcctgcctcagcttcctgagtagctgggattacaggcatgcgccaccacacctggctaatttttgtatttttagtagagatgggtttcaccatgtttgccaggccagtctcgaactcctgacctcatgatctgccgacctctgcctcccaaaatgctggtattacaggtgtaagccaccatgcctggctctacagaaaaatttaaaaattagccaggtgcggtagtatgtgcctgtagtcccagctacttggaagacaggctggaggattgcttgagcctgggagtttgaggttacagtgagctaggattgtaccattgcactccaacctgggcagcagagcaagatcctgtctcttaaaaaaaagagataaagtggaaggaggaagggagagaggaagctgagtggctgggcctctcttctttgcagagaaccaaatgggcaggaccctgccggagctgatcacacagttcaacctgacacaggtcacctgtcactcagccctgctggacctggagaagctcccagaattcaacaggtgagtggggagcatggagatcccctggtggcaaagggctttcttgcttatgatgatccctacagcagagggtataatgggctctggtacctaattctgtgtgaccatggctaaatcacctagcctctttgagcctctgttttctcttctctaaaatgggattaataacagtactgatcttatatccttgttctatgaaagtatcttgtattaagtgttgcatgaaaatatcttgtatagccctggcacatacaaagtgctcagtaaatggtacgtatatttttatcattaacattatgttcctagccaccccttgcatggactctgttaacaaccaaagcctggagaggtgtatcttcattttagactccctccccaccctcagccttacatccagccaacacagtgagtgagcactgtctcatggcatctactttatatttcatgtatttgatattgcaagtagctcttcacttggaaacctccaaatatcgttccaactcagatcatagttaacatgtctgagtcaaagggtattagtgtcggctgggtgtggcggctcacacctttaattctagcactttgagaggccaaggttggcagatcacctgaggtcaggagttcgagaccagcctggccaacatggtgaaaccctgtctctactaaaaatacaaaaattagctggacatggcacatgcttgtagtcccggctacttgggaggctgaggcacgaggatcacttgaacctgggaggcagaggttgcagtgagacaggatcacaccactgcactccaacctgggcaacaaagtgatactctgtctttaaaaaaagttattagtggtttgcaagaccatcagccaggtgtgcacctggggtgagggtcttcctgatactttgcctagagcactggtttggggacacagtatcagtgcatttacttgcatgagcccagagaattaacatcagttgcagatattttagggctattactttatttacttctcccatcagacctatgaggtcagttgtatgattttgccctgtttcacgtatgaggaacccaggacatagagaggttaagaaactagccaaagtggccaggcatggtggctcacacctgtaatcccagcactttaggaggccgaggcaggcagatcacaaggtcaggagatcgagaccatcctggcgaacacagtgaaaccccgtctctactaaaaatacaaaaaacttagccgggtgtggtggcgggcacctgtagtcccagctactcaggaggctgaggcagaagaatggtgtgaacccaggaggcggagcttgcagtgagccgagatcgctccactgcactccagcctgggtgacagaacaagactccgtctcaaaaaaaaaagaaagaaactagccaaagttcacacagtaaacagtgggcatcttttgaatggggcattcaagagtggatgtaggctgggcgcggtggctcatgcctgtagtcgcagcattttgggaggctgaggcaggtggatctcctgagtcaggagtcgagatcagcctggccaacatggtgaaaccacatttctactaaaaatagaaaaaaaaaaaaaaatcagcccgacgtggcgggcgcctgtagtctcagctactcaggaggctgagacaggagaatcacttaaacctgggaggtggaggttgcagtgagccgaaatcacaccattgcactccagcctgggcaacaagagtgaaactccatctcaaaaaaaaaaaatgcctctttctatatattttagtggctgggtctcgccctgtcacccaggctggagtgcagtggtgacatctcggttcactgcagcctcagactcccaggctgaagtgatccttccccctcagcctccagaccagctgagtctataggtgtgtaccaccatgccaggctaattttgttactttaaattttttttgtagagatggcatcttaccatgttgctaggttggtcttaaactcctggcctcaagtgatcctcccttcttggcctcctaaagttctgggattaagtgagccactgcacctggccaaaagcttctccaggtccagcaggactgagtggcaggtgacctgggaagcggaggttgcagtgagcggaggtcgcaccactgcactccagcctgggtgacacagtgaggctccgtctcaaaaataaataaataaaaataaaaggtcagctactattttgaaaacactgaaagcgtggctgggcatggtggcccacacctgtaatcctggcactttgggagcccagctgggtggattgcttgttgttgcctagcctggacaacatagcaagaccctgtctctacaaaaaactaaaaaattagctgggcatggtgatgtgtgtctgtgggcccagctacttgggagggtgagatgggaggatcgcttgagcctaggaggtctaggctgtagtgagccatgatcgtggtactgcactccaacctgggcaacagagcaagactctcaaacaaaaacaaaaaccaaacccctgaaaagaaagcacgtctccgagttgcttgggactttcaggctgtttgtgaccttagtcacatccctttctttttataaacgtgaagagattcttctagcttgcgaaagggagggctcatgggacctgatatgtcattcttccaacttcaccctttccctgggggagagacggtttgggtgggttggggtgttgacagcagggcagccccttgatttcttccgcagactgcacctccagcggctggtgagcaatgagagccagaggcgccagctggtggggaagctgcaggtccttgtggaggaggcctttggttgccagctgcaaaacagggatgtcctcaacccagtctacgtggagaggatcctcctgctgagacaggtgtggtgtcaggattctgggaagctgagggaggggttactgggtgcctcaattcctcctgccttccagagccctgtccctagtgcattcaatgactgcctccttccccagggtcacatttgccgcctgcaggacttggtgtccccagtatactcttacctgtggactcgccctgcagtaggtcgagcacagctggacgccatctcggagaaggtggatgtgattgccaagcgtgtgctggggtgagtacccgcaggctgagctcagggttccacaccctccttccctctctctgtcccatggctctctttccttcagggctgggctgttggggccccagcacaactccatggccagtgaagaagtgacccttcactggctttcgctggtgaggagggcttacccggagaacccgggctttctctggacataggcatgtgttcactgcttgcaccaacctggttgcatcccagctctgccgtgtactcaccagattatgtcaccttgctcaggcggcttcactttggccaagttactgtacctatttgagcttccttttccttctcagtgagagagagatgatgctaattcttactgtaacagtaataactttcaattacaaacgcaaccaaagctggcttaggcaagaggggaataattgcttatgtaactgtagatgctagaagaagggctgcttgaggcacagcttaatgcaggagtcggtactccattaccaagattcgctttcgctctctgcctttccccttctgcccctactcgccgatgctgaccacttttcctgcagaggctgtgtatcaggtaactagagggcaagactctctaccagacaaaagaaatgacagcgcatgtcctttgtggaagtacatttctccattatgtagcaatctgcaggaagcagctcagggctcatcctcccacctcagcctctttagaaactgggactacaggcacaagccaccacgcccaactaatttttttattttttgtagagacaaggtcttgccatgttgcccaggctggtctcaaactcctaggctcaagcaatcttcacacctcagcctcacagagtgctgggattacaggcgtgagccatagtgtctggccagggcctattagttctaattcaccaggattcagtgtcgtaactgcctgtctccaccatgaggttgggttttagatttgctctgggactccctctcgagtcaggaaagctgatacccaaatgttcaggagctgccagatcactagaaatcctttctgtgcctatgccatggttcttaactctgggccagctctagcaggtctggaactgccattgttcccggcctggggcctgtcattgtttcatcagctcctcggcagcctgcttccctgcagtgccattggggagagtgtctgcttttttcccacattatattttttgtcttcagtatttcatctcctgatttttgtaaatagcagtactcatgtgacccagttaataattgtctcagtccatggggttgctatagcaaaataacatagactggtggcttcaacaacagacatttatttctcacagatctagaggctagaactccagggtcaaggtgccgccgattcagtgtctggtgagagccttgttcctgggcccttcccttttccagcccttcgctgcatcctcacgtggtggagggacgagggactctctggggtgtcttttataaaggcactcatctgtgcataagggctcggcctgcatgacctgttcacctcccaaagcccacacctgtgaatactgtccccttgggggttaaaatttcaacatatgaatttaggggaacacaaacattccgaacatagagatgatgcagtaagaacgatcatcctttgctgggcgcggtgactcacgcctgtaatcccagcactttgtgaggcccaggcgggccgatcacgaggtcaggagatcaagaccatcctggctaacacggtgaaaccccgtctctactaaaaatacaaaaatttagccgggtgtggtggtgggcgcctgtagtcccagctactcggaaggctgaggcaggagaatggcgtgaatccgggaggcggagcttgcagtgagctgaggttgcaccactggactccagcctgggcgacagagcaagactctgtctcaaaaaaaaaaaaaaaaaaaaagaacgatcactcttgtctgaaattgaaactcatctgcttcagtgctgacagttagtaaggagatctgtctgcactgaaaggctgcttcttcaaatcacttatgaacccagttccctgagacagtagtggtccatactgagttgactttggaatgcagttgcctggaccatgtttgagcaggcagggtcagaactgacatcacagaccatctgcaccagaaagatgtccagccccagttcctcttcagtgtttccatgttggaatctccagtaataactgaagggaggctggacactgtggcttgtacctgtaatcccagtattctgggagggtgaatggggaggatcacttgaagccaggagtttgagaccagcctgggcaacatagcttgaccccatctctacaaaaggtaaaaataaaattagccaggcatcgtggtgggtgcctgtggtccaagctgctcaggcagctgaggtgggaggatcgtttgagcccaggagtttgaggctgcagtgagctgtgattgcaccactgcattccagcctaggtgacagagcaagatcctgtcttaaaaaaaaaataattaattatttttaaaaactgagaggaactggaaagttgcagtgaaatatactcatccccagcctattcccatctcttgactaactcaatcagggccgaggcaaatttttgttaagtccacctctaactgaatggagaatttctcctgaaacaaaagcttttgggcagagcatcttgctcagctggactgccaggatgtgggggttggttgctggcccgctggaatcctagaggcttcaatttgtggaagaatggccatagcaagttggtggcagagccattgctggagctgggtggggtcttctgatttcttctcttcttggctacgtctccaaagaagtctctctctaccaatcttaaagctgtatttcagataatttcccagaaattatccattctatgtcaaatctattcctaagtttcttttttgttgtgcctgcaagcagaactgtttctttttagatccttttgtaatgtctcaaagctcttgattgtacttaactaatttttaaaaattttaaattcaaatacgaaatgtaatacttggccgggcatggtggctcacgcctataatcctgcctataatcccagcactttgggaggccaaggtgagtggatcacctgaggtcaggtgtttgagaccggcctgatcaacatggtaaaaccctgtctctactaaaaatacaaaattagctgggcgtggtggcacgtgcctgtaatcccagctactcaggaggctaaggcaggagaatcgcttgaacctggaacgtggaggttgcagtgagctgagatcgtgccattgcactccagcctgggcaacagagcgagactccatctccaaaaaaaaaaaaaaaaaaaggtaatatttctgagtatttatcatgtgttcaggcacttggtgctttataagttttaactctctacgatagccttgtgcaggacagatactattatttttttttttttattttgaaacaaagtctcgctctgtcacccaggctggagtgcaatggtgcaatctcggctcactgcaacctcctcctcccaggttcaagcaattcttctgcctcagcctcctgagtagctgggactacaggcacccgccaccatccctggctaatatttttgtatttttagtagagatggggttttaccatgttggccaggttggtctcgaacacctgacctcaagtgatctgcctgccttggcctcccaaagtgctgggattacaggtgtgagccactgcgccagcctcagatactattattctccccactttacaaatgagaaaactgaggcataaagattgcatgacacagaggtagcaatgagtaaagcctcttatggcacctcttacctccctgcattgtgaccactggcttctctgtgtgtggtcccttggtggtttttccttcccgacctggataagggagaaagtggtcaatatcttcctcacctccctcaaaacaggcttgaacattggttgtgctgctcgtactgtagctgatcaataaccttctgaagcccttcctcccacccacttgccattggcccatgcaggccctgtaaactggccctcttcttctaggcttctagaaagatctagtatgagcttaactcaggatatgctgaatggagaactgaagaagctatcagaaggtctggaaggcaccaagtacagtaatgtgatgaaactccttcggatggccctcagtggacagcaggtgaggcagggacacgggttggattgttccctggagcccctcattgatcctttgaacttacatttcctggcaggcactgagctcaatattgagtatacaaaggtgaatgaaacatgatcactcccctcatttagtcaatcaacagacactattgagtacctactatgtgcaagcattgtgttaggtacagtgaatacaatatagaattaaacacacatacataatctctgcctccatggggtttgcagtttattggggataacagacctagcaacagcttacttaatatgggaaaatcaggccaggcacggtggctcacacctgtattcccagcactttgggaggcctaggcaggtggatcacctgaggtcaggagtttgagaccagcctgggcaacatggtgaaaccttgtctctactaaaaatacaaaaattagctgggggtggtggtgcgcctgtaatcccagctacttgggagggtgaggcacgagaattgcctgaacctgggaggcagaggttgcagtgagccaagatcgcaccgttgtattccagcctgggtgatagagtgagactctatctcaaaaaaaaaaaaaaaaaagggcggtggttggaggagaaacaggctcttaggacccatccttttccagggaaataacacaagcactgatcctcagaacacaggcagcagtgtgggggctggcctgggaataatttctgcagactaaggctgagcttcagttctttaggctgtttaaggtagtaaggcaatatttgctctttttgttcttagcaaggacctcctgtagctgagatgatgttggccttgggaccaaaggaagtacgggaacggatccagaaggtggtttccagctagggagaggatgtttcgggcagtggagatcgccctaagaacctgtgagcttagaaacagctttcagagaccagaaggaggcctggggcccgtcgggaagtttgctgaaggaactaagagtggaaacaatctctgactgcacacaagtgcatttgtgatccaccacaggcacgtttttgtcaattggctggggaagcccaacccatctaacctcctggactctggaaaggcattctccgggtctggtttctcacacattacacagcagaggtttggagttagttcacagaaaagttaacatcccggaacagtgcagaaggcttgggtttcagtttgctagggcccccataacaaaatgccacagaaccaggtggtttaaacaacagagatttattttctcacatttggaggctagaagttcaagatcaaggtgtcagcaggcctggtttttcctagaggcctcttttgttggcttgcagacagctgtcttctcactgtgtccttgtgcggtcttccctccatgcacacacatctctaagtttcattatgtgcccaacgttcctcttctaagaacaccagttggactggattttaactttaaccagcctcatttaagttaatcacctctttaaatgctcaatctccaagtacagtctcattctgaggttccaggggtttctcaacgtaagaatttagggggacagaattcagcccgtagcagctgggcagcaggactcatgggtcccagttctcaggccccaaggactcagagcagcaaaggatacgtgacacaagcagggctgaactggacaccagactttctttggggttgtaaaaggagaagtgtgactccactgccaagggtaagcactcttgtcttatgctaccctttattcttgaaccttggggcagcctgtgtctcccttccctaaacgtcatctgttccgtttttccagtcttccagacctggtccttggactggagaccttcacccttcctattttgtggctttctcttcaaatccacctcgtccttcctccatgacttataagtcatcatctctgctggtttctgaaatgagatatgcttcttggggtcttcagtgaagaggaatagcaagtgaaaggaggatggtggcagggtacatgaacccctaccaggcttctaggcttcccctgcatggcagccagcctctaagttggcccccaaccatccctgccttcttctattcacacccttgtgtggttccttcccacattgaataggcctgacttgtgtaaccactacactattgaagaaatgagagtttgacttctgagggtaagtcataaaatacatcgtggcttctgtcttgttttctttgatcgcttactttgggggaagccagcttccaggtcatgaaaatactcaagcagccttatggagtgctccacatgacaagggatcgaggcctcccaccaatagccatgggagtgtgcaatcttgaaagctggtccttcaattccagccaagcattcacatgaccgcaatcctagctgatctcgcttgtgacctctatgggagaccctaagccagaaccactcagagaagctgctccggaacgtcagacacacatgaactgtgagatagtaaacgtttattgtttaaagctacttggtttggggataatttgcgtttcagcagtagacaatatatttattttgtccaggggagtggaaaggcgattacagagtttgttgagccccatagagtcctagtctttgcttaaagaaatataccagttctttctaatacagaatccattaagttcgttggttgcaaacaatagaaaccaactctgcctcacttatgtttattggaggccataagagagccacagcatctaccaaaaagccaaaaaaaaaacaggttttggaaaagacaggaactagctacaggagctaatggccaatcttgtctgagttctttgatggcgacacatgaactacagccgttttgttgttgttaatttctccgtgttttcccctcagttttggatgactctgctcaaggttcagattctgaggagcaagtatctgttgggctatctgaggtcctgctaccattccttggccagtaataggtagtttcacagggattatatgcaatggaggaaaagttgttctcaaggaaaactagggagctttctccagaagatgatgtaatggcagaaacaacaggtggttgaccacagaaggggacaataataatacttgtaatttattgtgcgcttatatgagcctcaccctctcccaggtgtcagataatgctcgtaaatgccttagtccatcatctcagtaaattttttttataacactatgagagaagcagtattttttttttctgttacagatatggaaaccgaggttctgaaaagttaactaaaacttccgaggttatagtacgaggcaaaaccaagatttaaactcagatctgtgccgatccagagtccaagcttaactctgatctactgagtgttgtcagagcatctgtttctaagacattaagaatggttaaaaggagcttcttggctcatggtcaagtgagtgtttttaacaaagtgagtggtcaaaatactaagtcgattctggtatatctacaacatggatgaacctctaggacttcatgctaaatgaaatgtcagtcacaaaaggacaaatacgtcctaatgctttgtgaggcaaaggtggtaggcttgtcaaaggccaggagtttggagaccagcctgggcaacatagtgagatcctgtctctacaaaaaatttaaaaattagccaggtgaggtgacatatgcctgtagtcccagctacttgggagactaaggtaggaggatcacttgagctgaggcgttaaggctgcagtgagctatgaatgcactactgcactctaacctgggcaacagagcaagatcctgtgtctaaaaaaaaaaaaatgaataaaataaagttaaaaggatagatactgtaagattctacttatttgaattacttaaaataatcaaaattatacaggcagaaaataagatggtggttgtcagacttggggaggcagaaatgggaagttactgtttagggtatagagtttcagttttgcaagatgtagttacaggggtcaatggtggtgataattgcacaacattataaagatacgtaatgccgctgaactgtatatttaaaaatgactgagatggtaaattttatatttttctgtattttaccacagtttttaaaaaatactaaattagagctgggcctggtggctcacacctagaatcccaacattttgggaggccaaggcaggcagatcacttgaggccgggagttcaagaccagcctggccaacatggtgaaaccccatctctactaaaagtacaaaaattagccaggtgtggtggtacatacctataatcccagctacttgggtggctgaggcacaggaattacttgaacccccacagaacgggaggttgcagtgagccaagatcacaccattgtactccagcctggggaacagagcgacactctgtctcaacaagaaattaataaaaaagcgaaattaataaagctgttgctacttcctcaagtgaagtgtgctgtgctatcttgaaagcagctccagacgtctgtcttctgtttgagggttttgctcaggatcagtaagacttttttttttttttttaagaggatgttgctctgttgcctgcccagactggagtgcagtggcacaattatatttcactgtagctctaactcctgggctcaagagatcctcctatctcagcctcttgagtagctggaatcacaggtgcatgccaccacacctggctaagtaaaagtgtttgaaggaatttcatacattttaaataacctcaagcccatccccagtgttttgagggtatagtgcagcagtgaagggcacagaggctgtctagattcagaaacattctgccccttattcacatgtgactttctgtacctcaattttcttgtttgtaaaataggaataagaattgtacccatctcaaagagttgtaaggattggaatagataacatatacgaagttcttttttttttttttttttgagacgtagtttcactcttgttgcccaggctggcatgcaatggcgtgatcttggctcactgaaacctccacttcccgggttcaagtggttttcctgcctcagcctcccaagtagctgggattacaggcatgtgccatgtgccgccatagccagctaattttgtatttttagtagagacggggtttctccatgtggatcaggctggtctcaaactgccgacctcaggtgatccgcctgcctcggcctcccaaagggctgggattacaggcatgagccaccacgcctggcaacatatatgaagttcttagaacattacatggcatttaataaatgttaggtaactatcaccattattttcatccttagaaacagtgatcttggtggcaatgcatagaaacacactcagactaactgaaaccatgaaaggaatttattggaagaattaggactctcacagatctaaagggcaggacttccaactggacctcacaaaagaatggaatctgtacctagaaacctgttgggaccaaaggcagccactcggccctctgagatggcacagtttctaacattcacccctctgtgtgtctgctccccttgttttccctctgcaggctgcctttctctttatctctgcagttggccaacagctgccctagccctgaaggtaaatcatctctcttctcctacatcaccaattaaataaccaatattccacatacaaactcgcaggggagaatctgattggcctagcctgggtcaggtgtctacccctggtccaatcagctgtggtcaatgggagtcatattctatgatcatggctgcaggtggctcactttagtgtgtgggaaaccagttccttcccctgagcgtgttctttttcggtgttgtttagagagtatcttttccagggctgggcacggcggctcatgcatgtaatcccagcacattgggaggccaaggccagtggatcacttgagcctaggagttcgagaccaacctagaaaacatggtgaaaccctgtttctacaaaaaatgcaaagattagtggtgtgtagtgatgcacacctgtaatcccagctactggcgtggctgaggtgggaggatcacctgagcccagggaggtggaggctgcagtgagccaggatagtgccactgtactccagccagggtgacagagcaagactgtctcaaaaaaaaaaaaaaaaaaaagacagtatccgttctagaaaattacatttttatagccaaatttggaatcccattcatactgcctttatcctactttatttttgccttcatagtactttttactatatgaaattatatatttgtacatatttactctcttactcaaaagaatatgagattatggcaggaagtctgtctttttgtataaccatagcacctggcacgttgccagatacatagtaagggtcaagatctcatgatgaaaaagtgtttgaggactatgttagtaagatcagtttcttcagaaatggcactcatcagctggtctaactgccagactcttaacagttaccagtatcacttccatttaagcggggaagtctttcctcttttgcaagatttgccagtataattagcagtccagtctgttgcttgtaatttgcattgaatccagctgtctgggagaaactacctttgacaaagcttggaagtgaaggctggggacagatgactgacatgtgtttagtggggactaaaattagaagttgttggctgggtgtggtggcttactcctgtagtcccagcactttgggaggccaatgggggaggattgcttgagcacaggcgtttaagaccagcctgggcaacatggtgaaacccccccatctttacaaaaaaatacagaaattagctgagcattgtggtgagcacttgtggtcccagctacttgagaggctgaggtgggaggatagctggagcccaggaagtcgaggcagcagtgagctgtgtctgtgtcactgtactccatccctggtgacagagtgagattctgtctcaaaaaatataaatgtcagccaggcgtggtggctcatgcctgtaatcctagcactttgggaggtgaagtcaggtggatcatgaggtcaggagtttgggaccagcctgaccaacatggtgaaatgccgtctctactaaaaatacaaaaattagccaggcatggtggtgcgcacctgtaatcccagctacttaggaggctgaggcaggagaatcgcttgaatccgggaggcagaggttgcagtgagccgagatcacaacactgcactccagcctgggtgacagactccatctcaaaaaataaaaataaataagtaaataaataaataaataggccaggcgcggtggctcatgcctgtaatcccagcattttgggaggccgaggcaggcagatcacgaggttaggaaatcgagaccatcctggctaacacagtgaaaccctgtctctactaaaaacacaaaaaattagctaggtgtggtggcatgcacctcaggggttctgagggatgagtaggagtttcccaggtagatgggtgttggaaggctattccaaggagagggatgaaaaataaagcttcacaaagttgttcaggactggaccaagagtaggagtcaggggagaggtagaagtggctgctgagaaaccaggcagatgtgagatccaaataataaaacccagattcaatagaaaaaaattagctggggccgggcgcggtggctcacgcctgtaatcccagcactttgggaggccgaggcgggcggatcacgaggtcaggagatcgagaccatcccggctaaaacggtgaaaccccgtctctactaaaaatacaaaaaattagccgggcgtagtggcaggcgcctgtagtcccagctacttgggaggctgaggcaggagaatggcgtgaacccgggaggcggagcttgcagtgagccgagatcccgccactgcactccagcctgggcgacagagcgagactccgtctcaaaaaaaaaaaaaaaagaaaaaaattagctgggcatggtggcatgtgcctatagtcccacctactagggaggctgaggcaggaggatcacttgagcccaggaagtcaaggctgcagtgagctgtgattgcaccactgcactccagcctaggcaagagagcaataaatcttaaataagatttattatcgtacttagcaggaagttcattggtaaggtgggctgcagggttggttaattacacgtgtggtgacatcagtgaggacccagggtccttctctctctccaccctcctggccacagcatctgcagcagccacagttggctgcctgcagcagtcaggcctctgcacttcctccttcatgtcagctggggagagggtggctttctatggctgtctcccaacagcaaggaaactcctaagtaccctccctctactcaacttccaaatttttagccatccctgctggggaagtgagggtctccataaatcagtcagatccagagctggagatgaagggagtctgcgtgtccctgaggtgcatggccaggtggggagtggcaggcacctcagcaaagttagggttcaattaatgaaggcaaggagttgggtcttcataaggagggaggtgcagagccagtgaaatgttttaggcagggaaatgacatgagcagattgtggtttttgaaaggtcactctggcaactatgccaaggagagacttaagcaggagcagatggaaggaaggagccccagtaggagaagattggaaaatgaggcacagaaaagggctattttcacgataaagccatgttctctcatcacagcctctaagggcctaggttagggttctccagagaaacagacccaacaggatatatatctaggaagagagatttattattagatagtgcctcaccaaattatagaagctgaaaaggccgagtgtggtggctcatgcctgtaatcccagcactttgggaagccgaggcaagaggattgcttgaacccaggagttcgagaccagtctgggcaacatagtaagaccccatctttacaaaaaatagaaaaaaaaattggccgggcatggtggcgtgtgcctgtagtcccacctattagggaggctgaggcgggaggatcacttgagcccaggcagttgaggctgcagtgggctgtgattgtaccactgctctccagcctgggcaacagagcaagaccctgtctcaaaaaaaaaaaaaataggtcagaggtgatggcttatgcctgtaattgtaatcccagcactgtgggaggctgaggtggaaggatacttgaacccaggagttggaggctgcaagtgacctatgattgtgccactgcactccagcctgggcaacagagctagactctgtctgtagaaaaaataaaaattgatagataagctgaaaagtcatctgatctgcttgtgtaagctggagacccaggaaagccagtggtgtagttgaagggcctgaaagctggagagccagtagtgtagattccaatccaaacctgaatgcctgaaatccaggagtaccaaggacagaagattggtatttcagcttaagctgtgtgttagtctgtcattgtgttgctgtaaagaaatatcggaggctgggtaatttatttttaattttaattttttttttttttttttttgcaggctggagtgcagtggtgcaatctcagctcactgaagcctccacctcctgggttcacacgattctccggtctcagcctcctgagtagctgggattacaggcacacaccaccatgcccagctaatttttgtatttttagtagagaaggggttttgtcatgttggccaggctgatcttgaactcctgacctcatataatccatctgccttggcctcccaaagtgctgggattacaggcgtgagccaccatgcctggccttttaatattttttggttttgtagagatggttgtcattatgttgcccaggctgatcttgaacccctgggctcaagcaatcttcctatctgagcctcccaagtagctgagactacagggacttgcaccaccacacccagctgatacatatttatatatatatatattatctcttttagattaaggaaaaaaaaaaccccatgaaataggcacttatcttatttcttagatgaaaacaacatagttctaatcacaatgcctgcacacccaaccactacattaaactcctcaaccacttcctacccacttagcctttatcctttctgttgtggtctccagaccatcagcatcaatgtcagatggagatctattacaaagacaaattctggggcctcattccagacgtactagatctgaaactgtgtggcggggccctgcaatttgcaacaaacctgattctgacacatgctagtttgaaaaccattgatctagatgttgtgggacatctataccttacatctttcctcacctctccaaagggtcatggccaacactcctataacaaaaagacgggttaagaccaggtatggtggcttatgcctgtagtcccagcactttgggaggattgcttgagcccaggagtttgagaccagcctgggcaacatggtgagaccttatctctacaaaactaaataaattagctgggagcggtggtgtgtgtgcctgttatcccagctactctctgaggactgaggttgcgaagatcatttgagcctgggaggtcaaggctgcagtgagctctggtggtgccacggaactccagcctggttgacagagcaagaccctgtctcaaaaaaaaaaggctaacaagagaaaagcataacagatttatttaattaaagttttacaggccgggcacagtggcttactcttgtaatcccagcattttggaaggctgaggtgggcggatcatttgaggtcagcagttcaagaccagcttggccaacatggtgaaatcccgtgtctacaaaaaaattccaaaattagccaggcatggtggcggggtgcctgtattcccagctactcgggagactgaggcaagagaatcaattgaacctgggaggcagaggttgcagtgagccaagatcgagccactgcactccagcctgggcgacaggacttcatcaaaaaaagtttcatcaaaaaaaaaaaagttttatgttgacatgggagctttcagaaataaagaccgagggaaggctgtctacttttatatttaggtttgatgaccaacagccaggtagaaataggattgaacaaaatggtatgagtgatctattagacttaggtggggggatccagcaaggcctgtccaaattcttcttggcttacctgtatatcactccttcttcctaggtatagggcaggaataagggggcatgaccacctgttatcagacaaagtagctcagataattgctttttttttcttttcttttcttttctttttttctttctttttttttttttttttgagacagagtctcattccgtgcccaggctggagtgcagtggtgtgatctcggctcactgcaacctccgcctcccaggctcaagtggtcctcctgcctcagcctcctgagtagctgggactacaagtacacaccagcacacccagctaatttttgtatttttttgtagacacgcggtttcaccatgttgcccaggctagtcttgaacacctggacccaagtgatctgcacgcctcagcctcccaaagtgctgggattacaggtgtgagccaccatgcccgactgagaatttctttatggccaactcttaagcagaaataaaggaaggctggagtaatatgtctaggttttgtggctggctttaggggagaggggtttgagtttccctgacccatcttgggaaagaggaattgagtttctgtggcttgccttgggagaagaaagacgggcaggaggtcagagaacctttgctctgaggctgcttctgagggtttccactgtctttgagttcaaagtactcgctatgccaaaacaccatgctctgggatatggttttctgagctccaacaatgtaaaaatgttaaaggattgcaggtgcttaaaataagtaaagtttcaggagttgaaggatggtccttggcaaactgtagagctcatgccccctgtagcatgtggagactctagtcacgtccaggttttgttgaaatgtggaaagccgggtccagtgttgccagatgttcagaatcttcaagagataaatatgtattaaagattttatttaggccaggtgcagtggttcacgcctgtaattccgacactttgggaggccgaggtgggcggatcacctgaggttaggagttcgagagcagcctggccaacctggtgaaacgctgtctctactaaagataccaaaattagccgggtgtggtggtgggcgcctgtattcccagctgctcaggaggctgaggcaggggaatcacttgaacccaggaggcagaggttgcagtgaactgagattgcaccattgcactccagcctgggcaacagagcgagactcaaaaaaaaaaaaaaaaaaaaaaaaaaaagattttctttaactccttaatgaggaaactggtgagatgttcaaaccagtccaaagaatggacatcatgtatagatcaggaatgttgaaatggatgtgcaagtgggggcagaactggtttttccacaagaagtctgtgtgttcccagaacagtattcatttgcttgtgtgtggacaagaatcatcacccattgctattcagttatctacaaggaagaatttgtgcttctgtatggcatacgtacctatggtctaagaagaatgtgtgttctgagttccaagctacagaatcacagagtggccagcccagaggttcactctttatctaagaggaacatctgaacccttggccccatcctgtggaacgcaggccatacgggggatcaaggccctttggggttaaattgaggttgccagatggaggttgctaggggaagggtgctagttgaaaatactatataaactgatgctctttacaaatggtagtggtcctcctgtccagcccactgccactagaccaccccgtaagtcccctcagtaaacctgcctcattcagtggctctgggtctcttcttccgcctttcaaacatggtgccatccctactgaagttaataggggtacggcacaacagcttcaatggaaaattatgtgttgtctagacagcacaaccttccaggttctagcctttctttgtctttgagaagtctcataactctgttaagttgataccaatgcaaaataattcttgcctataaataggtaaattccgctcactggagggacagctctcaccccggtcgaaaagccagttttgcctccatttgcacattcgtcttatcttcctttttttccagataaatttgcccttctttgacttcacttttggattgattataacatctgcttggttccctcatgtaattaaataaaatatttaacacgtattcatttcataattatgataatcatgacatacttttttgggaaaattatcttttaacagaataagcaagtaaataatacatcgatggtgtactgtgtgatgcagaaaataaagcagagtattgaggaatgcaggacatgttagtttagaagtgttccaggaaaccagggaggtggaggttgcaatgagccgagatagcaccactgcactccagcctgggcgacagagcgagactccatctgaaaaaaaaaaaaagtgttccaggaaaacccttctgtgaataaaaatgcaagcacataggccgggcgtggtggctcacccctgtaatcccagcactttgggagggcgaagcgggcagatcacgaggtcaggagttcgagaccagcctggccaacatagtgaaccctcgtttctactaaaaatacaaaaaaaaaaaaaatagctgggtgtggtggcatgcacctgtagtcccagctactcgggacgctgaggcaggagaatcgcttgaacccaggaagtggaggttgcagtgagccgagatggcacccctgcactccagcctaggcgacagagtgagactccgtctcaaaaaaagaaaaaaagaaaaataaaaaataaatgcaagcactttgggaagtcgaggtaagaggatcttgtagcccaggagttcgagaccacccgggcaacatggtgaaacccagtctctaacacacacacacacacacacacacacacacacacggtgaaacccagtctctaacaccaggagttcgagaccacccgggcaacatggtgaaacccagtctctaacacacacacacacacacacacacacacacacacacacacacggtgaaacccagtctctaacacacacacacacacacgccaggcgtggtggtgccctcccctagtcccagctcctccggagactgaagcgggaggatcgcttgagcctaggaggtggaggctgcagtgagccgtgatcgcgccattggactccagcctgagtgacagagcaagaccccgtctcttaaaaaataaaaatgctaaaagaattattcgtgttcttctgaaaatcaaatttaactgggcgtcttgtattttatctggcaaccgtacggtgagtggtcttagaagaccagcgctgggtggagggatctggactaagaaatgttccggccggtcccgcgtggagggggggcctggggtgggcgtggcgccagcggccccgccccgtcacgtgtccaccgctcctgccgcgcagtcagcagaggagagcgccaggacgctacagcggctgaagaggcagtggcgcccgcggccgcagcgtcggggctggagcgatggcggcgaccgcggtggcggcggctgtggcgggaaccgagtcggcccagggtcccccgggcccggcagcgtcgctggagctgtggctcagtgagtagcctggcaggccttcggcgcagccgctgcgccgcacgtgaggcctcgcttcccgcctcccggggccttgcttcggggcgggcggccgcaggggaggccggcggccgggtagggggcctgggcccggcgcggtggggaagatcgcccaggggtcccccgagaggagccccaagcatccgccggggcagcggcccccttctgagctctgcccctccccctccgcccaccccccaacttagcagcagcacaggaccccgacccccaccccaatggctacgtgacctgcgctttcccctgcgccaggcactgtgctcacagcggcttagtcctgcttaatcctcattcccaccccgagctggcttctattattaaccccactacggaagcggggaccttgaggcttaaggagacgcagtcgtgcaagacatgcagtctgtttggggctgagaaagatctctatctggctaccgcgtcaaaaagaaattttttaccttttgtgtttactttggccagacttttttttttaaacacacacacacgtgtgtgtgtgtgtgcgtatatatatatatgtgtgttttttttttcctttaagagacggggtctcattatgttaccctggttgggctcaaaccctttggccagaattcttctgcatgtctcctgtaagcttcacagtcatcttaggggttattattatctccgttttaccaatgagggattgaggttcaaaggggataaagaatattccccttgtacccagctctgctaggtgccaggaacactgagatgcataacacagggtccttgctcaccaaaacattttttagtgggtacaagccggcagtcacatcaccttactaacgggattggcgaggaggaggagggcgttcgtttcacctgtggtggtaggagttggtttacctgggggtcgtcacagccgaccgcattccaggcagaagaaactgcgtgtgcaaaagctggggacaagagaatgtggagcactccgggaacaagtaggtcagtccgctggagtgcaagcctaaagctcaggaatccgggaaaggggctgcacggctaattggggcgagatcttcaagagccttgtgtgctgcagaaaggagtttatgttttatccgagggcggggttgctgtttgggagttttcagccggagaatctgatcaaggaagcctgttaaaggcgtcacttgcagccatatggtgctaaattgggcggagagggtgagacttcaggcagggagagcggctaaaaagctcttttggtggtggttgggggccgcaggaggactaaggcagtggggagagggagaagcaatgagcaggcgtagtcagcagcctcggtgccttggaatgcagacaggggacaaggagaaatctaggctagatcgcgggtttcaggctcgaggaactggtgggttacagatgcctcccctgtgaggaggagctggtttaggcagagaaggttgagatgtggagtttgaggtgcttgtggcatagtcaaaaaagagatgccctctaggcagctggttggcactggagagggcaagtgtgggacgtacggtttgggagtctggttcattggcagtgagcttgcgggagaagcttgcgtatattaagagcagaggtttggaaagagagcgtggggagccccagcattgaagaggcagatgggaagagaagactgaaggctgagcagaaacaggcagggggagacctgcaggggcacccactgatagcaaaggagggatgtggttgtaacgtagttttgctccttaaagatggaggagaatgaggaaggagaagagagaactttgaatttggtaaccaaccagttatttaatgagacatccttgagttaaacagtagagacagaaggtagtagttttaggaggcaatggagaacagaaggcttagactggagttgcaaaaattagaaaaaaaggctgttcatgcctgtaatcgcagcactttgggaggctgaggtgggccaatcctttgaggccaggagtttaagaccagcctggccaacatggtgaaaccccgtctctactaaaatacaaaaaatagccatgtgtggtggcgcacacctgtaattccagctacttgggaggccgaggtgggaggatcacttgaacccttggggcagaggttgtggaggtggagccaagattgcaccgctgcactccagcctaggtgacaaggcgagattctgtctcaaaaaaaaaaaaaaaaagtagccggagtaagagaaagtagctgcctcaggtggaggagataaaaggagtgcctggaactgaggctgcccaaggacacagttcttcaactccagctttttttgaaacagagtctcactgtgtcacccaggctggagtgcagcggcatgatctcagctcactgcagcttacccctctcctgggctcaagcatttttcccacatcagcctccccagttctagctttttttaaatgtatttttatttatttatttatttatttttgagatggagtcttgctctgttgcccaggctggagtgcagtggtgccatctcggctctctgcaacctctgcctccttggttcaagcaattctcctgcctcagcctcccaagtagctgggattacgggcacacgccaccacaaccggctaatttgtgtgtgtgagagagagagagagagatggagtttcattcttgtccaggctggagtacagtggcacgatctcagctcactgcaacgtccgcctcccaggttcaagcaattctcctgcctcagcctcccaagtagctgggattacaggcattagccaccatgtctggctaatttttgtatttttagtagcgatagggtttcaccatgtttgtcaggctggtctcaaactcctgacctcaagttatctgccagtcttggcctcccgaagtgctgggattataggcatgagcctggcctaatttgtgttttattattatggtttttttcatggcatatacattgtattaagctccagcttttgggggcagtgtcccaaagttgctagatcttcctgtttttcaggaacggctagaacctatattcttaagtgaaatatcgtgggttttcagaagttggtgcctactttggcccataatttggggaaggccaggcagaataaatgtgtggggagggtgcagccagtggcctcctcagctgtttttcatgagtcttgaatgtagaaggagggggagagaatagcgagagggaatttaggagtaaaggagattattagaaggagagggggacatgtgagcccctcttcatgttgatgttccattggggaactgcccctcccccattctgggtccagtgtcccatccattgcagaggggcctgaaggtgctgaaggagctcagagccagagcaaaaagggggacctggcctcacagagaggaaggacaccttttgtttttctgactgtctggcgaaggagatcaagatgattgcacatgcaaacaagttcgtcagtgccaccattgccacctgagtattgggtgctcaagtggaacaggggacttgaggaaggtggggaagcgttggggagtggctggtgaggcaaaccgaagtgggcccacccggacggagagctgggtttctcaacctttgcacgagtgacatcttgggcccgataattctgtgttgtgggggctgacctgtgcactgtaggatgtttagtggcatccctgggctaaatccactggataccaaagctcacacccttcctcccagtcataacagccaaaaatgtcaccagatactgccatgtttccccagggttgagtgggatgggatcactcctacccatctccccgctgagttcctgagtgaggactgcagaatgctgactggacatcaggaatgtgggttgcagtcttcatggctgtatttgttgttgttttcttctgggagtaggagcagagaagatgaagtgaacgatgggttaagtcagatttgttggggatggtgggccattggtgctgcaatggagggataagggggtcgtgggattgatagtatggccaagacatgggtgtagttgaaggcaaaagctcatgggtctgagctacatgaagtcaccagggggtggtgtctgaggactggccaagatcaggtccctgcaaacaaggcagctgtatctttaagatgggaagagagtaataaaacctcttcttagggttgttgagagaatcaaaggctttaatacacagaaagcacttaaaatagtgccttactatgcttgtagtaagtgcccaagaagcgctagctattattatcattaggcttttatagctgcaagtaattgaaactaactcatacccatacccgcttaccaaaaaaaggaaagtaaagaaagtcccagagtaggggtaggctcagtccaggagctccacggttcacttctttgattgaattttctctgctttgctcttctccctactgcaatctcagcagaatttcttttccccattgatttgcaagagttattgttcttccgcctgttggcttgggttttatgtccaccttggagtcagcatgacctggggtcatgaaatatgaagatggccagacctggggtggggtggggtgggggacagtacccaacccagagccaaaggtggggagggtgaatgggggacctggaattgaggagaggggttgttcccagaggagtatcaggaagccgttaccagaatctcatgccttaaaagtacaaacggcagcgcctgtgcattctgtcattcagttctgtggtgtttttttccacttcatgtattttggtcattattccacatgactgcagatgtagccgccttgttcttttaaatgaaaagccttagacgccccgttgtatgggtgtcctaggatccatttaaccgggtccctgttggtagacatcttaggtgttgctagccttgcgctattaaaaacagcactcagtcctcttgggctctagaattctagctctggtagcgctaccagggaggccatggcttagtaaaagttgggtgctcagtaaatctgtttcttccttccacttggtcctactcccaggtgatgagtaggacattcccatgctgagtcttggaggttttcacatgtgctgaattgtatgattgccggactcttggggtccacgtgtccctcccagggaaggagtccccctgcagcgtggactgctgaaggattgcattctgctcctcggggtgaccacttcctcacagtcttggggctccccttgctagcacaggcggctgctggtgccagggtcatgaccccggtggttggttggcagctgacgtgggatggtttggcttctgaattagtcactcttggatgagccatttcactcacagccggaggtctcagctgttttcttaacacctctggccctgtagcacgcttgaaatgaatcatacaaacactgcttttagtgaggaaatacatggcagcagtgctatttctcagcacccctctgtcctgctcaagtgccagctataaataaaccaccttggagtctgggatagcccaaaacagagaaggcatcctttgaatttctccctggccgtgccctgtctggcccctagctagtccttggagcagattggtgtcaaacagacctacggcggttgctgtggcctggtcagacccagctgctggccccctgggggtcattttttggagctgctcaagtcttctgaaatagtttgtgcaggctgggattatgtgtttaggggcccagttatttcagaactgagatagccatctctccgtgttatcagtatgtccagccagctggccaaacactgtctagcaaaagaggaatcgttcattcagtagatacctgccagcaactcttctaggtactagagcctgtgagagtgaatgagacaggcctgctttttgccttcaaggagtttatgagcacgaagatcaagctggcttccaagagaggccctaactttgtcaaggaactgaagacctcaccgcaagagtggttagaaacacatccaggctgtggagctgggccagcctatgacttaatttttgtttctgccactcccttgctttgtggttgggtaggtttcttcatctgtaaaatggtgtagatgatcgtgccaacctggattgttctgaggacatctggcatggtatctgacccatagtaggtacttttttttttttttttgagacggagtttcactcttattacccaggctggagtgcaatggcacgatcttggctcaccgcaacctccgtctcccgggttcaagcaattctcctgctttagcctctcaagtagctgggactgcaggcatgcagcaccatacctggctaattttgtatttttagtagagacggggtttctccatgttggtcaggctggtcttgaactcccaacctcaggtgatccgcccaccttggcctcccaaaatgctgggattacaggcatgagccactacacccggccccatattaggtacttttaaaaatgacggttactgttacttttgagccatgataaatcttttttccccccataggaaaatccgttttccttttattcagtatgcagtggagctaaagtgcagggcacgaagtattttacacaacattttaagttcttgtgtataggttttcatggaaatttaaaaatttaacaatgatgggataatagataataaactcatcgtaagtacattatcactaggtttcagcaattcttattttgccatttattttcaactatcaatccaaatatcctagtagtgttttaaatcaaatataagatataatatcattaattttggaaacatttaagtaactatatcttacaagtaaagataaaaaagaaaatatcattattacaactaatacaatttttaatatataaaatagatcaatttgtgtattcaccaaagagtagactctacaaccactgaaggctttgcatgaaatgttttaacatgtttcatctaatatttcatcttcagacacaaaaaatcaatacatgaaaatattcaattacgtataaagggctatagactatggttggaggaggaaatcgcaaatcgacagtgggatattccaaaccactgtattgtgaaagcaaacacaagaaagaaaatagggattcctattgttcccgataaaaggaaaggaaaggtaactcccagagagccactccctcactttgccatattcaaatgttctgaacaaggcacaggtctggccatacccaaggaaagatgaggattcagggtgtaacaaaagacagcagagatcatggggcgtcttaggattctgcccccaatatccacccttccacaaaaacttaatctgacatctcacattggtggggatctggtgttcttgtaagaaaaaaagaaagtctcagaaagtgtttcccttgtagactctggggcagttgatcctcagcactttctattttggaagccagaaaattcctttttgactgagaaggggtgcagtcctgtgcaccataggattcccattgttgactgcatgtcagtgggagccaccagctattacaaccagaaatgtctgggcaaacttcctcaggatgcagaagctgctcccgtgagaaccgctgctcctctccatatgtgaacagactgacagatgcaggcagcaccagcaatctctttaaccactgaggtgcactggaaaatgtgagttgcagtgtgtccctgtgttagaattattaagaggcttttgttgacaattgctgagaccatacaatgcaccacagcaagattagctgggtaaatgatcttctgataaaggtttgaacccagatgttcctcttttgttgttttcctggaagtgggtaaattcagttttcacttcggtagctcccctaacaatcccaagaccaggtcttttactgcttccctaggtggcatgaccattatcggcctggggtaagatgaactgatttcatctcttcctttataatcatgacgtaggggcctcatttcacatgcacagattccctccaaagagtagatgagcaggcctgggccaccctggtgcttggagtaatgacagccttgccccgatgccactctctcttcccaccattgttgagttttgggccatcatgcattcagtgcctcagtgggcagagaaccatacccaggtgctctcacaaatctggagccaattctaaagttttttggactccagctcagctcagaccactgtcacatgctagggactgtgggtgactgtggacatcactggcacctgcttgagactgtgggtgattgtggactctgagcagggatgtgctgtgtccatgtgacactccttctccccaagagttgttcaagaaggtggtgccctaggaatgccatctggacccagtggaacaagaagggcagaaagcacctggcacccactgttcataccaccatcacccagttccttcaagtggctaacttgaagatgtttcctctcgatgaaaatcctaaacaacaaaaaaagaaaatcctaattttgttgtttctttcagcagaagtgatattttctagtctttacagttgagaagtttaggatcttataatgttaatttctctctttaagatggcattagtgcaccgaataccaatgaaattcatgctgacagccctttatagcagcggcatgttgatgcaagtctttgtattcacacggccatgacacagcctccagtttctgtgctttatctttgtgaggaaaactaaatagaaaatacaggtcacggtcatttgccaaggcacacaggtcgaagtaatatcttgcataaacactggcagacacatgaatattaaactcaagtagctccaaaaaacacttctccatcttgctcatgttctcaactgcaatgtccttgggattctggctgtcatccacactccacagaccatgatttctccaaaccttggaggcaagaagcatggctccaaggacaatctttttccaattagtaggacacagagcgatgctaccattagttaaaagtcgttcgatgtacaccaaagctacgattgcacatggagctgtagttttatgacttgaaaaagagtacagaaatgtctgaaagtacagttgtgtttgggatcatgctcgaaggatttccctggaaccttctcttgtgaaagtgggtgtattggcttgtcaaaaatagccagagatctatttgcgtatctgtgctttatgttgtaatatattgcccaagtcacactttctaatgtgtgtcaaagatcaggctggctgactgttctgttatctagcaatatggtgtaacacgaggtgtattttctatcaagatgccatggtatatataatataggtgagagctcctcttttcttgcacactcatttgatattttctcaaaaaaagcgtactttcccttggatggtcagaagcaaaatatttgggcatctcctggtcactgatgtgctgcaggtcatggcccttgcgggctcctaaatccgactgggcaggctccacagcagtggggtgtggcgctactgccacctccgcctgcgtgatgttatagctgcagggcggttccacccgccacaccctgcactggctttgcttggggctggcattggggagcagtatgttccatctgcgacgcctctgctcctctctgccttggcctgcacctttgcttgacgctgcctcatagatgtcagcactgcaggacagctccccaggccccgcacactgccccgcttggggctggcattgggcaacagcgtgttccatctgctgtgcctccactcctctctgccttggcctgcacctctgcttgccaccgcctcatagatgtcagagccacagtacagctccgcagacccccctgggccgaccctacctggggctggcattggtgctcaagcaacagctcagcatgttccccgtgaggcagctcggctcctggctcctctccggtagcttgggccttcccttgcttccaagtctgcagagctcagcacttatacctcttcccagcaaaggcacgctggcagggccagcccttggctgtggggctgctccccactagcagcccgcaccccacctcagctgcctcccctgagctgccttgtctacaagggtcccttgggaacctgtttggtttccttagaatgggtctagatacaacaagcctgagagctgtgattgcggagaagagagcacagagggagctcctcttccttccactgcttcccaccaactgaaggaggttgccctgccaaccaccagagctctctcctggttcccaggaaccaatctggcccagagtcccctccacatgccctgttcccatcgtgatgcgggagcctaggcacgtggttcaccaggccccgccctgccagcggccccacccctacctttcattcattgctggctgctgggagctttcaggtttctacactgtgaggaaggtcttatggtttcaacaaatgaagaggcttatgtaaaagaaaactgagccgggcacagtggctcacatctgtaatcctaacactttggggggccgaggcgggcggatcacgaggtcaggagatcgagaccatcctggctaacatggtgaaaccccgtccctactcgggatcttcccgcctcggcctctcaaagttctgggattaccaataaatcttgattgagtcctcatgatacaagctctagcaaataagaaagaaacctccttacattttgtggattgtattgctgcttggccttggttaagggtttggaacgtaatttaacctcagagaggttttttctttcttaaagaaagctggtgccggccgggtgtggtagctcacacctgtaatcccactactttgggaggctgaggtggacggatcacgaggtcagtagttcgagactagcctggccaatatagtgaaaccccatctctactgaaaatacaaaaaattagccagtcatgttggtgggcacctgtgatcctagctactctagaggctgaggccggagaatcgcttgaacccgggaggcggaggttgcagcgagccgagattgtgccgctgcacaccagcccgggtgacagagcgagactccatatcaaaaaaaaaaaaaaaaaggtggtgcccgtcagtgctgtgtctctttcacttggcagccagggaggagtgagaaggctctggattctgtgaggggagcttgggccatgcctcctgttctctgcctctcctgttctctccctgcctccccctgttctcttcctgcctctgctcttctctccctccaggtccagtcacatgctgaagtcagaattcttttgaggtgtcaaccttgaccttgtagtgaactgaaacagaagcttaaatggtgtagactttaggtgattcagacacataatcgctgagaatcactgctttaaataatttatttgatgagtttctatgttgtacgtatgggtaaggcactgtagggaagatatggcttctgcccttaaggtttcattctctttaggtaggacaagacatgtctacatattacagtaaaagccagagactgtacgtaataataaacaattatcctttgtagacctcttactgcatgctgctgtactaagcattttagacccttcccctttaaatcacatgacagtcccatgaggaaggtactattttccttgttttattttttgtaaacatatttgtagagatggggcctcactatgttgcccaggcttgtcacgaagtcctgggttcaggcgatcctcctaccttggcctccaaagtgctgggattacaggcatgagacactgtgcccagactgtttttattattatttttgagacggggtctcattttgtccccccaggctggagtgcagttgcacaatcatagctcactgtagcctccacctcctgggctcaagtgatgctcctgagtagctaggactgcaggtgtgtgccaccatgcctggctttttttttttttggagacagagtctcaccttgtcacccaggctggagtgcagtgtcacgatctcagctcactgcaacctctgcctcccgggttcaagcgattctcctgcctcaccctactgagtagctgggattatagatgcacgctgccacgcccagctaattatttgtattttggtagagacgggatttcaccgtgttgcccaggctggcctccaactcctgagttcaggcaatccaccctcctcggcctcccaaagtgctaggattaaggcatgagccactgcgcccagccttctgactaattttttttaaaaatttctgtggagattgggtctcgttatgttgctcaggctggtctcaacctcctaggctcaagcggtcctcctgccttggcttcccagagtgctgggatcataggcatgagctgcagcacctggccctattttctttattttatagttgaggaaactgaggctcagcgagtccaagtacatgtgactaatgggtgtagctggagatccctatcggagaaggggcagataaaatatctgttcagaggaggaggagacagcttttgttttatggggacgggagataaaaaggtcagagaagtctttagggtggaatgtgacttgggactcaagggtagataggattttaagatacggaacatgggagagagctttgcgggggtggggaggagaatataggaatcaatcactgatccttccctcgcccttgtgttctctcttcacttagaatggagtcagtgggcaggaagatggtgattacctgtccgttgaccctccctatctagacacatgacttccacgtgacataaatgtgactgcagtcaggaaaaattcaactcggactgtgctgtgttgagtaatcagagggagaagcagtggggttggcgcagcgggaggaagttttctgcaggagctggaaattcagatgggtctggaagaatatggatagggcactgagaggaacagagtggacactcgggccaggaggataataatgtcagaagtactgccccgagaagcaacgcctcatttccagagcctaaaagagctgctctgtcagaaccagtacggtttctcatcagagaggctgggcaggccaggaccagatggccagaggggagttggaagggtggttgttttttttttttgtttttgaggcaggatcttgctctcccacccaggttggagtgcagtggcatgatcttggctcactgcagccgcagtctttccacttcagcttcctgagtagctgtgactacagtcacatgccaccacgcccagctaattttttttttttttttttagatggagtctcgctctgttgcccaggctgagtacagtggtgccatctcagctcactgcaacctccacctcctgggttcaggcaattttcctgccttagccacctgagtagctgggattacaggaacactccaccacgcccagctaattttttgtatttttagtagacacagggtttcaccatgttggcaaggctggtctcaaactcctgaactcaagtgatctacctgcctcggcttcccaaagtgctgggattacaggcgtgagccatcgcgcctggtcttaattttttaaaattttagtaggcatgtgatttccccatgttgcccatgctggtctcaaactcctgggctcaagcgatgcacctcagccccatgaagtgctgggattacaggtgtgagccaccatgctgccactggaagttttatgaacggtcaagatggtattccttctggtggtgtgttcttgtcttcctgtcacacagctgagacacttccaggtggcctctcttctgtctccgcttgtcacaggccaggtgggggcatcccaactcgagtgtgaagccaacacccgggccaacctctgcactaaaagtggagccgctttcaggggaataacttgtcagttaatttttttttttttttttttttttttgagacagagtctccctctgtctcctgggctggagtgcagtggcgcaatcttggctcactgcaacctccacctcccaagttcaagcgattctcctgcctcagcctcccaagtagctgggattacaggcatggatcaccatgcctggctaatttttttgtatttttagtagagatggggtttcatcatgttggtcaggctagtctcaaacttctgacctcaaatgattccccccacctcggcctcccaaaatgccgggattacaggcatgagccactgtgcccagccagcttgttaatttgctggttcattcaatcagcaaatattcagtaagggcataccatgtgcccaatgctgtgctgggtggtggtaggcagcgcaggcacaattcctctccttccagctgtctgcccactggtctgatcctgtagatctgtgataagacagctcttggccaccatgtgtatggggaggggtgtaaatttcttcctattatgtactctctaactttattatttatttgacagacaaagccacagacccaagcatgtcggaacaggattggtcagctatccagaatttctgtgagcaggtgaacactgaccccaatgggtaaggtaacttctcacacacatagttgactctgggggcaccccacactgagtgtaggcctttgtctctcaagactgttttagggttaagctctctaggcaaggatcggtggctcatgcctataatcccaacagtttgggagaccaaggcaggaggattgcttgagcccaggagtttgagacctgcctgggtgacagagtgagagactctgtctcaaaaaaatagaaatgcagtcaggctggcattcattctctcattttcccctataatcctgagaacattatttttctaaaattagcaaattcatgtgggggaaaaaaaacacaggatagctcacttgcaactggcagttattaattttaaatactgttataaaacactaatgctgaggagaactctgaatgttactgatagactatagacacgttacctaattaaaagagatctgtgtattctccaccatttaaatgtaattttaagaaaaaggaaaaggggaaggttttattgaattctgtttccacagcatctggataggacctgaagaatcagaatcaagtgagtcatccagatgttttgtttttgttttgttttcttttcttttctttttttttttttcctgagacagagtgtctcaagactggagtgcaagggcacgatctcagctcactgcaacctccacctcccgggttcaagtggttctcctgcctcagcctcccaagtagctgggattacaggcgcgtgcctccatgcctggctaattttttgtatttttttagtagagatggggcttcaccatgttggccaggctggtctcgaactcctgacctcaggtgatccacctgccctgacctcccaaagtgctgggattacaggcgtgagccactgtgcctggcccatccagatgtttaatctgtgtggtgtcgcatatttggccagtttgaacccagagtttgatcgcactttctgctctagcatttcctaggtatttatcacagccatacagggcctgtgctgctgtggctactcatgggactgggctgggactggcagcttggagtttgggggctgggggttggctgaggggagggcagtgtgccctgggcaggaggaggaccttgggtgctgtaggtgcaaccagggtgggtgcgaggtggccctctccagggcccccgcgtggcctgtttgtcaggcacgctccacctctgcttttggacaccagcccctggaagaaaagtgattttactgagcatgctcagccactcgggttagtttctttttgcccgcccagagtctaggtctttttgtttccctgtagccccacacatgcgccctggctactggcccacaagatccagtctccgcaagagaaggaagctctttatgccttaacggtgagtttggcttgccttgtagcctaacctttcctgtccttgtgctatagagagccgagaggcgctttgcttccacacagatccttttcactggagaagggaggtcccctgagaggtttaccttcacagcaggttggaggagggagatctgggccagggtccccacccttcttcctcctgtttctcgtctgtttcttcagggcagcattgagtctactgtgggagaaggaaaggaaggttttatttcatttgcccttcttagaccagggctggcaagttcatgtgccttttctagagagggcagttctagcacagggcccactagctgttggcaggtatgagtatgggctcagggttgctagtttaggtctttgtatatgtttgagtgtttagatgttggtgactaatttgcagtgttgaaagccacagtatggacgagaggaggggtctgcaggctcagcttgcctcttgagtgccagtgggtgacatccggctggtcttgggcactggataccagatctctgcctctggggaggggttggttctttagccactttctcctctcaaagggtctccttaaaaggtggggtgacctcagggtttgacatacctcactaagctatttcctgggcataaacctcaggcagttatagcaagattgaacaggggacatttttttcttgatctgaaaacgtcctcttcatcaaaacttcagtgtcctcataggcttgaggcagggttagccttggttccagcgcagtctccagcaagtgattaccagcctggaggggagcctgggaccactggctttccaccttctcctgggggtcctgtgtctgtgcaggtgctggagatgtgcatgaaccactgtggggagaagttccacagcgaggtggccaaatttcgtttcctgaacgaactgatcaaagtgttgtccccaaaggtgagtacctgggcttggctctgctgactgtgtcgcacctacgcccactgtcaaactcctggctccctcctcaggccagaggcaggcccacgcatggacaaaacctgctcctgcctgtgaaagaagcgctctcctctccaagctctaggaagaggctctgctcattagctgacccctgcccctcactgttagcattttcacatttcccttttaagaaggcctggggaacgtgtggcctagaggagatgaggaactccagcttggaggcacaggttcctgatagagacagtgagagatcccaggggtggcgtgaaagtttcctatcacctcctgccttgtcctctgtacctgtcctcctggcacctgtcttagctcagccagtctcaggtaaccaacattgagccctgccttgttgtgttcccacaacagtgccgatgctggccatgggtcctacagttcatttcagttctgacactcccctgagttgcatgctacccggaccccacgcagtgagggctcagtgctgcttaggcttcctgtgtttcagctgccagccgtgagtctcatgtgtcctcaagctgctgcacttctgcatccccagctgcagattcaggggttcctatgacccccaccgccccatattccataattccctagaatgattcacgtacacaggaaagcactatactttctatccctgttttattgtaaaggatacaaatggaagcgatacataggcaaggtcttggtggggcaagaggggacagagctgctgtgccctcccctggactctgagcttgccatcctcccaacgtaggttcaactgagaggctctctgagcttccttgtttcagtgttttcatctgaggtttttttgttttgttttgtttttttacacatcattgctggcttgaactagcactaggttttattacctaggcatgatcggtcaaatcattggccacatagttgaactcaatctctagttcacacccccctgcccgccccaccacctccacaggtggggggatgtgggggcaccggtcaggggatggggctgaaagtttcagccctctgatcacaaggttgatctctttggagtggccagcccttgaagctctctaggcactcactgtaagtcattagtgaaaactcaggtgcaccctgcgagtgtgtctcttgaataacaagacactcttgtgactcaggaaattccaaggatttttgaagttctgtgccaggaacggaaacaaagaccaaattttattattatattcttgtccaaggcaaaaaatgactgtccccagtggtgtagaacaggctctgacccaggctcttgcatggtggggtttagtgtgagtattgccgagatgaattccttgaatcccaggaagggctccggggctgggcgccagatggtgtggcctctagtctctcctcacactcataccgcgcctgggagcttgtgtctctgggcctcagcagctacctctttagttaaagtgtcggtctcccaagtcccttccagctctagaattctctttcctttttactttcagtacctggggtcctgggccacaggaaaagttaaaggaagagtcattgaaatactcttcagttggacagtctggtttccggaagacatcaagattcgagacgcttatcagatgctgaagaaacaaggtctgacttgccttactgtgtcttatttcctcttgactaggcctgtatcttcttgctttttcatctgccttataattttttgttgaaagctgtacttcttatgtaggaccatagacactgaggtagagttttttttttttttttttacgcaataaatcttttatctacttacctttaaaagccatagtgcaaacctggaaagatgatgtagggtttgcttttttccctgttgcctggaaatcataggaaaccacagcatgaaaaaggtcaaaatacaagctacctatgtcactaaagcacttatttatcttttaaaagacttgtttgcctaaaaactaaccttttggtttttttttttttttttttttttgagacaaggtgttgccctgttacctaggctggagcacagtggtgcagtcatggctcactgtagcctcgaccttctggactccagccattttcctgcctcagtctcccaagcagctgggactacaggcgtgtgccaccatacccaactaattttttcatttattattattctcccacccacaccccaacacacacacacaaacacacacactctcttcctctctctctgtctctgtctcacttgctgtctcacttacaccaaatatttgtattttttgtagagacagggtcttgcaatgttacccacgctggtctcaaactactgggctcaaatgatcctcccacagcctcccaggcgtgagccaccatgcccatctttaacctcttttcctgaaatagtggaaccttactatgaagtacagataaatgctacctatgagctagagtttgaaaaatactattgtgataaaagtaacaacgtgcagacataaaatattttatagttacaaaagatctttcagtaatcatttagtggatttatttttatttacttcttttttttttttttcttttgagacagagtctcactctgttgcccaggctggagtgcagtggggcgatctctgttcactgcaacctccgcctcctgggttcaagtaattcttgtgcctcagcttctcgagtagctgggattacaggcacctgccaccatgcctggctaatttttgtatttttagtagagatggggtttcaccacattgctcaggctggtctcaaactcccaacctcaaatgatccgcctgcctcagcctcccaaagtgctggaattacaggcgtgagccaccgctcccggctgtggatttatttttaattgacacatacttatacacatttattggagtacaatgtgatattttggtacatgcatacaatgtgtagtgatcaaatcagggtaattggcatatccatcagtgaggtaaggagtttttaatccctggaattgggtagagctttccttttggtagacaggatttgagctgggtgtgagatttgttgttgctgtagttactatatcagacttcagattcctctagtgttagctgatgtttaggttgggggctagctagtttgttagttttcttcagtatctgttctctcagctgtaggtcttcactttcctctgcacctcagagagagcctttctccttgttcttgccactcgtagcagtagacagccatcccttgtcagagggatagggtggcgggcagggccagtctctgttctgattcagcctggttcttaggcaggcactgcatcctgggtcttggtaggatctgtttgtgatcctgcctcaccccagtgtagatctgggcccaggacataattcctgctcctcctccaagggtactagggtttgtttttgttttttctcccctgttttttctctagctgcagtgggttccaccggtgctctaaggctgcagggtttgttactcttctccccctaatcccgccttcaggccttcccgctgttttcgtgagcctctggagaagagcttattttctttttgttgcagcctccagaaattctgtattctcttggtagctcacactggcctgtagacaatttttaaataattctagcttagttgttactattggtattgccttttgtcaatccttggaggttgtttttttccttagatttcaggttacttggttgttgccctgtgatctgggctctctgatgtattcagggaagctgtaggctgggcatggtggctcacgcctgtgatcccagcactttgggagtttgaggtgaggaatcacttgaggccaggagtttgagaccagcctgggcaacatagcgagacccccatctctacaaaaaattttttaaaaaaattacctgggtgtggtggtgcccacctgtagtcccagctacttgggaggccaaggtgagaggactgcttgaccttaggagtttgaggctgcagcgagccatgatcacaccactgcattctagcctgggagacagagcaagaatctgtctcaaaaacaacaaaaatattgtgaatttgcacactttccagtgttttgttgttgtcacgatgggggtgatagttcccacctttgtgtgtcctgtttggaagatgggaatctgaattcctttttatgttgggctcttaaaagaaggaactcaggttcaggatggactgttgttccctgtcacatacactcagcattttcaggagcttcatcagggaccctccagaaacttttgatccctgggaggttatgtagctggataaactgatccatgcttttacagcataaggcccacagactgcaggccttcaggactggctcttctctgacatagttggctctgctgtcccggccaccatggtcccttggattctcctaagagatgatgcaaaacttcgttcatacactgggtgttgtctttgaaggctgttgacagtgctttgctagcatggtattaggaaccaggggtttccagactttatactggattctgactgaagtttctgggtaccatatcggtgtcttaactttgtaaattgcatttttaggaattataaaacaagaccctaaactaccagtggataaaatcttacccccaccatctccctggcccaagagctccatctttgatgctgatgaagaaaagtccaaggtaaggaaacagacctacatggtgtctgatcagaccttttctcttaggcactgtaaatgccctttgatgcttgaatcggagtatggaggggggcaggttacatgggttctcctctccagacaggcccttaggagtgaggtagcagaaggtttgggtgcgttcttcatggataagtcaactaataagggccagtctgttttgattcagcctggttcttaggcagacactgcatcctgggtcttggtaggatctgtttgtgatcctgccttaccccagtgtagatctgggcccaggacataattcctgctcctccttcaagggtactttgtgccctctcccttttgtgcacagccttcctgggggaaagaaggtgcagaaggatagcccgtggggagtgtgggtgatggatgggtcatgtcctgtgtgggtgtggtgttggggtggggacagtggaagaacttgctgctgtgtgttgcttcagctctttctcagtgccagtgagcccggccctatccattttccatccaccatgaactccccaaaccgttattccttggacatcagtatctagagggacaagaagaagaaggtggccaagacccagggataactgtggtgcctgtgagtggggagccctttggcctagtgctggcggtgcttttggtcatgactgttcttggtcagtcacaaggtctagttcatggagtgttggaaggctacacgctgcgtactcgtttctgcgtggtatgctctgcctgtcaactgcaccctctccctgtacccactccttgggcctagatactctgtggccatcaggtccctgttgttagaatgagcaaggctagtctaggttccaggccacctttctccgctttcctcctgcttggtgccttaggtttgcagagggtgggaggagctaggaaggaggtatggtgtgacttctgagaaacaatcctgtgtcaccagccctcattatccccacttttcctgccatccgtcccacaaagattgagtgacttctctgtgccaggcatcctgctgggcgctggaaatgaagggatgaacaagatcaccagggtctgttgtgtcataaagcacatggtccagggcaactgcagacctagtccccttttgggccagagaattctctgttgttggggactgtcctgtgcactgtaggatgttcacagcattcctcactctacccacgagctgccagtagcaccccctctctagttgtgacaaccaaatttctccagacttagccagacatcccctgggagaagtaacccccacatccccctaccccactgaaaaccagtggcaggccaggcacgctggcttacgcctgtaatcccagcattttgggaggccgaggtgggtggatcacgaggtcaagagattgagaccatcctggccaacatggtgaaaccctgtctctactaaaaacacaaaaattagctgggcatggtggcacgcgcctatagtcccagctacttgggaggctggggcaggagaattgcttgaacccgggaggcagaggttgcagtgagtcgagattgcgccactgcactccagcctggcaacagagcaagaccccgtctcaaaaaaaaaaaaaaaacaacagaaaagaaaaccagtggtgtattgggatagtcagagtgcctgcatcgtagtgtccttggaccatttggtgagatggtgcatgtaaaatgtgtgcactgttgttagtgttaactcttctgttgctgctgcttctgctctaggcctgagggagttgtggtctcacctactcttcctgttcactctctgcagcttctgacaaggcttctaaagagcaaccaccccgaggaccttcaggctgcaaaccggttaatcaagaatttggtcaaggaggtgggcattcttccagttggttcagtagaagtagcatttgacagaggctgaaggacagtgcatatgagcctatgcttgaggggtagaggaacggttgcctgggagaaagagtggctcctagccctgaactctggggaacagccatagtctccctcaagggcagcaaggtggtgattggaaccagaaatcccgctgccgtacttctcagctgctttcatccatgctgctcaaagcatttcctagacaccagcttgggtcccagcaacaggtattggtatggacaaagtccaggtttaggaatctgcttttcagaggacttgaggctggtggcacaaaggcagaggtcatggtcaccagtccccaaactgcattttcctccccaggaactctgggcttttgagtattttttcacccactgtgtgagttctcccatgcacttaacatcctggtgatgcccctgagcgagctctctcaatagtgactctttcccatcccttgttcaggcttcagccagggtttctgctccctcactcccatcctcctctttttcccaaaaggaacaagaaaaatcggagaaggtgtccaagagggtcagtgcggtggaggaagtgcgaagccatgtgaaggtgctgcaggagatgctgagcatgtaccgcaggccagggcaggccccgcccgaccaggaggccctgcaggtaatacaggtgtaacacagggggctgcacatgtttactaaagtgggtttgaaatgctttcacctgtttgcacccatgaagccatctcagagtcaagacggtaaacatatctgacacctccccaaatgtcgttgtgctgctttgtcctccctttgtctgtcccttgctccccagtccccaggcagctgctaatttgctttctgttctgattggctgacaactcccagactcttgtataaatggaatgatgcagtacataaccctctatttttgcctggtttctggatctcactcgagatccattcacgttgctgtgtgtagcagtagcttgtttcttattgccgggtactgtcccgtcacctggatgtaccacagcatgtacctgttgatgggccttgcgttgtttccagctttgggtgattgtgaatcatgctactgtaaacaattttgtacgggattttgtgtgaacatcgattttcatttcttatgggtaaatgtctgggattactaggtcatatgctaagtatatatttaacttgttaggaaacaaagtggctaagctatcttcaagggtgattgcaccattttacagtcctaacagcagcatatgcaagttctagctcctccacatcttgagatcttggtttttatatagcatctttatgagataattaacataccataaaagcaaccatcacacctacctagttatagaatatcttaatcacccctaaaagaaaccttgtacccattaacagtcattccccctttcccaaactcccctttccccagtccctggcaaccactaatccactttctgtctctctggatttgcttatttggatgcttcgtccaaatgcggttgcacaatacgtgggctttcgtgtctggcttcctttacgtagcctaatgtttgcaggtgcatccatctggtaatgtgtcactgcttcattccttttcatggctggatagcgttccattgtgtggctatgccacagtttgtttctccatttatcagctgatgggcatttgggttgttcctactttttggctattatgaatgatgcctttgaattattcattacgaataatgactttgaactttgtccaagtttttatgtgaacataggttttaaattctcttgggtatatacctagaaatggaattgctggatcttggggtaactccatatttaacattttgaggaactgccaagctgttttccaaagtggccatgccattttacattcccagcagcaatgtattggctccagttctctgcatcctgccaacatttgctgttatctttttgattggagtcctcctggagggtgtgaagtactgtctcattgcaactttctgtttcttgatggcttatttatttcctatgctcattggcagcttgtgcatcttagaagacatgtctgtgcaaatccattgcccatcttttggattgtcttttttgagttacaagcgttttttatatattctggatacaggttccttatcagacagttttctcccttcctttgggctgtcttttcactattttgatagcatcttttgaagcgggagttttgttttgttttgttttttgagacaaggtctcgctctgtcgcccaggctggagtgcaattgcgtgatctcagctccgcacgacttctgcctcccgggttcgagcgattctcctgcctcagcctcccgaggagctgggattacaggaatgtgccagcacgcctggctaattctgtatttttttttttttttaagtagagacagggtttctctatgttggttaggctggtctcgaactcctgacctcaggtgatccacccgtctcagcctcccaaagtgctgggattacaggtgtgagccactgtgcctggccagtagagacagggtttcaccatgttggccaggctggtcttgaaccctggcctgaggtgatccacctgccttggcctcctgaagtgctgggattacaggcatgagccaccatgcctggcctttttttttttttaatgtcttcctggtgcttttgttatcacatctaagaaaccacagcccagccgggcgcagtggctcatgcctgtaatcccagcactttgggaggccgaggcaggcggatgacctgagttcaggagttcaagaccagcctgaccaacatggagaaaccccatctctactaaaaatacagtatcagccgggcgtggtggcgcatgcctgtaatcccggctactcaggaggctgaggcaggaagaatcatttgaacccaggaggcggaggttgcggtgagctgagatcacaccattgcactccagcctgggcaacaacagtgaaactctgtctcaaaaaaaaaccaaaaaaacaaacaatcaaaaagaaaccacagcctgtctgtgccaggttcgaggcagccatgctgttggtctcccttggaactctgttctccacctccttctgcaggtctgtttcagccatctccctctgcattccagttttttatgtctctctgcacaggaggagagccagcctccacgtaacttctttatttacctgtccttccacttcacaagattagtagaaatgaactactgtctttccaaattcctaagagaaagcctcccgagtagctgggattacaggcacccactaacttttgtatttttagtagagacagggtttcaccatgttggccaggctggtcttgaactcctgacttcaggtgatcagcccaccttggtctcctaaagtgctgggattacagacgtgagccaccctgcccggtcagattattttattttcagaaatcatacacttgtagcctgtagtctttttctgaaactctgtcatgttacttcaaaactgcagtctctaagtcaggaccattgggaggccttctgaagccccagactctgccgtctgcctgatcgaaggctcctggggccctggaggggggcgttatggggtgcctgggcgtgtgtcatgaaccaagctctgctctttcaggtcgtgtatgagaggtgtgaaaagctgcggcccacgctgttccggttggcgagtgacaccactgatgacgatgatgcactcggtaagttttctttccttgggtgtagctagcagcccaggtgcaagacagactcggtccctcctgtcacactgctgtgccaggaacaagacagagtggactttcggttccgtggagcttgggcttggggagggtgtggcctgagttgcctcagaactgacttccagcaggatccaggcttcagtaagaaatcagcagcaggtctaaagcctgaaaagaagtggaaattgaccatggagattggggtgtgagaggtagaagaaagatcccactggaggcttcaggaaaagctgaccaatcgcaggggccagagaaacagctgtgggtggtgtctcaaggggatcacgggcttttgtaccttcaggggccaggtaggtcaactaagagggccaggccgatgggaaatggaaggtacatctgtaaggaagtggagaattgtccacagttactaaaaaagaattttaactctttattgtggaaaatctcgaaacatgagagaggggaatagtaaaacctatatattcttcactcatctttaataattaccagctcatagctgatttttttaatcttacttcatctgtacctctctttgtacacacccattccctagtctgttttgaagcaaattctagacatttctttttcttttaattattttggagatggagtctcgctctgtcgtccaggttagagtgcagttgtgcagtcttggctcactgcaacctctacctccctggttcaagccattctccttcctcagcctcccaagtagctgggattataggcacccaccatcacgcctggctaattttgtatttttgtaagatgacatttcaccattttggccaggctggtttcaaacttctggcctctagtgatccgtctgcctcggcttcccaaagtgctgggattacaggcgtgagccacgatccccggcctctggacatttcagaataatcaaagattcagtcagtgttcagattgccctgataaaatttctccttaatcatctcttgctaacttaaaaaaaaaaaattgttctaaatcagacataaaagaaaagccatataattggtttatatttcttctgtctctcttagtggatagcatgtgcatgccctctgcaatcctttttccttttttttgagacagtctcactctgttgctcaggctggagtccagtggcgtgctcagctcactgtagcctctacagcctttacatcctgtgttcaagcgattctcatgcctcagcctcctgagtagctgggactacagttgcgcaccaccacacctggctaatttttgtacttttagtagagatggagttttgccatgttggccaggctggtctcaaactcctgggctcaagtgatttgcccgccttggcttcccaaagtgctgggattacaggcgtgaaccaccacacacagccttttttccttgcatgaaaataggccctctgaattgacagttctctcggtctcagttttgctcgtggcatcccccatgatgctgctcatgttctgtttctgatatttctttttttcttgagatggagtttcgctcttgctgccccggctggagtgcaatggtgcgatctcagctcgctgcaacctccgtctcctgggtttaagcaattctcccacctcagcctcccgaatagctgggattacaggcacctgccacggctgattttttgtatttttagtagaaactgggtttcaccattttgaccaggatagtctcgaactcctgacctcaggtgatccacccgcctcggcctcccaaaatgctgggattataggcatgagccactgcacagagccagcagcttcagattctgagttaaagttaaaagtttgttattgaaagggccttaatttgagtgcttactgctggccattactctggacagtacaggtgtagaaggtgaacagatttgcttccttctgcattgagaactactaacatgttaggactcaggttaactgactaggcctgatagggtccgatgacacaacctggaggcaggaggtgtggataaactgaacatagtctagccatatgaaggctgttttatggaaaagcttagaaaagactgagattgttggttgccaaaccagggggttctgagtcttccctcattcttcagcggaaattctccaggcaaatgacctcctcacccaaggagttctgctgtacaaacaggtgatggagggccgggtcacctttggaaacagagtgaccagctcattgggagacatccctgtctccagaggtatgtttgaaagcttctccttgccttctctgccttggggcagcctgtaattcccagaaaagaaatgggtcctaaacatattctgggttaaggaatagaaatgagagaactcgccctttgttccccttcctgtgaaagtggatatgttgccacacccagccataggaattgtcatgagctggttgccgggctggaccccagctttgactacacacaaaagcagatggctaagctgtgcctgcgtttgaattctcataaatgcttgcatacaggagctagagacaaaagaaatgatcttccttagtggttcctagtgccaggtcagctgtatcagaatcacctggagcactggttgaaatgcggtccctggcttggaccttctgaatcaagactgcttggagctgggcctggaggtgtgcgtctttcaagcactgtgggtgattctaatcagctgtggtcagaagcctcagaatggcctgagctggagaaggccgaatctgctttcctccagagtgatgggatctttgcaggagggcctatgatccctggggtaggaaggcaggccttggctccctcttgtcttggatgccagctgagcttgtgtgtcaggacactcagctgagtggaaggttcttggaagggcagggagggcgttaccatttgattaggaggtggtctgagggaagctgataggatttatgtggagactttgctctcatgtccaactgacttctcttcctaaccctgggctttctagtctttcagaatccagcaggctgcatgaagacctgccccctgattgacttggaggtggacaatggacctgcgcagatggggactgtggtgccatctttgcttcatcaggacctggcagccttgggtgagggcaggtgcttgtggggagcaggcacaggatgggtgcgagtaggggagtgagctggttcccttcgcggagcacatgcctgctgctgagggagtcgagatggttgtgaataggaagagtgagctggttccctctgggagcacgtgcttgctgctgagggagtcaggatgggtgtgagtaggggagtgagctggtccccttgggaagcacgtgtctgctgctgagcaagtcagggagagtgtgagtaggggagtgagctggaccctcggagaacacgtgtctgctgctgagggagcacatacctgctgctgagggaatcagggtggttgtgagtaggagagtgagctggaccctcagggagcacatgcctgctgctgagggaatcgggatgggtgtgagtaggggagtgagctggttccctctgggagcaagtgcctgctgctgagagaatcagcagggttctgagtaggggagtgagctggtctcctcaggaagcacatgcctgctgctgagggaatcagggtggttttgagtaggggagtgagctggtcccctcaggaagcacatacctgctgctgaggcaatcagggtggttgtgagtaggagagtgagctggttcccttggggagcacatacctgctgccaagggaatcaggtgttctgggcagttcagagggtcccccttgcatattagtcacagattggccatggacgagtcacatgaccttcagtaagttgcttatttgtctagactttctggatgtcctagaaaggatgggtgtggcattactcttcatctggaagcaggtggagttactgttaggcatctcactctactcctttcttacaggaatcagtgatgctcctgttacaggcatggtaaggatgcccttcccagggcccggagagagaatgggagggtctcagacctgcccttgtgaggcagcactgcctggcgagcagagaggtgctcctgcactgtcccggtgggatcatggccttggaggtccaaagcctcttcctcacccatactgtctggctgatacctgggggagacaggttgcaccaggctcctgcttcctggaggtctgcccaggagctgcatgtgatcttgccctttctttcccctcttgccccaagagatgtcaccagtctgggccacagcagcttgggtgggctcaggagagctgtgccttggttttactgtggctgatggtcattcataccctggtcttattttagccattcctgatttgacaggtttctggtcagaattgctgtgaggaaaagaggaatccctcctccagcacgctgccaggcggtggtgttcagaacccttctgcagacaggaatttgctggacctcctctcagcacagccagctccgtgccctctgtgagtcttctgggcaaggggagtgggagagtgtggctcctgagtgcggttccttctcatgggacaagggccagagaatggtgctctaagacagcctctcgccctggagaaacatctttctttctttcttttttttttttttgtctttttttcttttttttttttttttgagacggggtctcactctgttgcccaggctagagtgcagtggcacaatctcggctcactacagcctttacctcctgagttcaagcgattctcctgcctcagcctcccaagtagctgggattacaggcacgcgccaccatgcccagctaattttttttttttaatttttagtagagacggggtttcaccatgttggccaggctggtctcaaactcctgacctcaggtgatccgtctgcctggccaagaaacatctttctattgaaagtttaggccaggtgcagtggctcatgccttgtacttgttttcacactgctgataaagacatacccaagactgtgtaatttaaaaacaaaaagaggtttaatggactcatagttccatgtggctggggaggcctcccagtcatggcggaaggcaaaaggcatgtgtttttgtttgtttgtttgtttttgagatggagtctcgctctgtcgccctgggtggagtgcagtggcgcgatctcagctcactgcaacctctgcctcccaggttcaagcgattcttttgcctcagcctcctgagtagctgggattacaggcgtgtgccaccacacccggttaattttttgtatttttttttagtagagatggggtttcactgtgttagccaggattgtctcgatctcttgacctcatgatccgtctgcctcagcctcccaaagtgctgggattacaggcatgagccaccacactcagccaaaaggcgtgtcttatgtggcagcagacgagagaatgagagccaaacgaaaaagggtttccccttataaaaccatcaggtctcatgagacttactaccgtgagaacagtatggggaaactgcacccatgattcagttatctcttactgggtccctgctacaacatgtgggaattgtgggtgctacaattcaagatgagatttgggtggggacacagccaaaccatatcatacctgtaatcccagaactttgggaggccaaggcaggtggatcgcttgagccctggagttcaagaccagcctgggagatatggcaaaaccccatctctacaaaaaatactaaaattagccaggcgtggtaggtcatgactgtagtcccagctgctcaggaggctgaggtagaaggatcacttgagcccggaaagtcgaggctgcagtgagccattactatgccactgcattccagcctgggcagcagagtgagaccctgtctcaaaaaaagtttaatgtgctgcttcccttttctcattttacttcttttcctaagtcgtaggaaaatacctgctttggccaagacatctgaaaagaggtttatttaaggactaggagtagtagaacatgaggtttttgccgtttgtttttgttttcccttctaataaccatataattgaagttaagcaaaatttgatccatggagaaacatacaacaaagtgcaaagtgccactccctaaaaacaaggttgaacgttccttttttgctttttttgtatacatgtagtggtacattcctgtgtcttgttacacaaacaggattttaatttataaaccgcactccagcatgaccttttcatattatatctgtgatgcatttcatatcagtttctataaatatgcctcagtcttaatagctacattacaatttattgcatggatgtatttgatcatttcccttttttggacatttacataatttctggtttggaggtgcttgggggagtgccttatagtatagatccctgaagggagaggttctctaaggtgtgaatgtaacaacattttcatagatcctgtccctttgcctctggaaaagtgcagcttaccttcacccaaacagcctgaaagtgcccatgttcctgatagaaaccaccaggctcaggcagaagtgggatgtcctgggagttcattcccatttgccacccagaggtcatttcttgcagtcttctttttttcagccactcgggcagggtgggttatttctcctctcaggactttagttttctaaaatgttttcagtttgtgtcccaaatgaacaaaatcatggagtggatagtagctggtataatttgtgtatcatctgcctggctcaagtccctttgtgatcacacctgggaaacaacctgactgagctacttattgtcagggactgcccgacaggtacaacatgaacaaccttcataacaaaggctctaggttattgggttcttattatgtgtggacattttaagtgcttttgtttttttcttttttttttcctgagatggagtctcactctgttgcccaggctggagtgcagtagtgtgatctcggctcaccacaacctccgcctcccaggctctagccattctcctgcctcagcctcctgagtagctggtattacaagcgtgtgccaccaccacctggctaattttttattttttatttttttttaatttttgtatttttagtagagatggggtttcaccatgtcggccgggctggtcttgaactcctgacctcaaatgatccacctgcctcggcctcccaaaatgctgggattacaggcgtgagccaccgtgcccagcctctaagtgcttttcatacatcgtctcatttgattcttacagtagccctaggaggtaaattacttctgttattcccatttaacagatgaggaagctgaggtatgagttcgattacttgacaaaagtcatataacatctggcgcattagctcacgcctgtaatcccagcactttgggaggccgaggcggacggatcacctgaggtcaagagtttgagaccagcgcggccaacgtggtgaaaccctgtctctaataaaaatacaaaaattagtcggacatggtggcaggtgcctgtaatcccagctactcgggaggctgagtcaggagaatcgcttgagcctgggaggcagaggttgcagtgagccgagactgttcgattgcactccagcctgggcaacagagcgagatactgtatcaaaaaaaaaaaaaaaaaaggcatataacatctaactctgtgtgtgtgtgtgtgttattttttccttgttctttaataagcctaacccagattccaggaaatcgctacaatttttgctagtctttgatattttttatttctttgtaggaattatgtttcgcagaaaagtgtccccaaggaagtgccaccaggtactaagtcctctccaggttggtcctgggaggctggcccgttggctccttccccatcttcacagaatacacctctggctcaagtgtttgtccctttggagtctgttaagcccagtaagtacaatttcactccccacctttttttttttttccctgggaatctattagactcccagctttttccactccagtttgatagaggtggcccttaaatttggttgataaatgggagagattttgcatgagggcagaaagtaagaggttgtggccaggtatggtgactcacgcctgtaatcccagcactttgggaggctgaggtgggaggatcacttgaggccaggagtttgagaccagcctgggcgacatagccttgtctctatttgggggggaagaaaaaaattgggaggccaaggcaggtgatcacttgaggccaggagttccagaccagcctggccaacataacgaagccctctctctacaaaaaatacaaacattagctggacatggtggtgcatgcctgtaatcccagctacttgggaggctgaggcaggagaactgcttgaatccaggaggtggaggttgcagtgagccaagatcatgccaccacactctagcctgggtgacaaagtgagactccgtctccaaaaaaaaaaaaagtttgcttctttgtcttttagctgatttcttagccttccttagtattgacactgtcaaggatatgggcaggcagaatttaattaaaaggcttacttaggcacataatgttcgttgatttgggttgggattcaagaagggaatgtttaatgtggcctgaaatgactggcaagaggtagaattcaaacgagtggatgaatttggctagtgatcctccttctctagggatcctccttaaggcagaaaagtggatattatctctgttaaaagggaaggaaatggaaggctcggctaattaaggtgcctaccgtctctacaccagtatgcagagcaggacacaactcaggtcgtctgttccagggcctggactctttagcacagagccctcctatggctctttgtggtgaggttagattgcagagagccctgaaagccaggcagacaaatttataaataaacagagttgataaacaatgggagctctttgcacatttctttattgatttttgatttaagaaataatacatgttcaatgttaattttctgaattcaataactgtattgtagttacgatgttaacatctggggaagctacatgaagggtatatagaaatttttgtattagttttataactttttataagtctgaaattattacaaaacaaactttaaaaaataaaaaagttaaaaacaaaaatacatgttcaaaatgtagagttttattaaagatagaataggccagacgcagtggctcatgcctgtaatcccagcactttgggaggccaaggtgggcagatcacttgaggtcaggagttcgagaccagcctggccaacatggtgaaaccctaaaaatataaaaattagctgggtgtggtaatgtacacctgtaatcccagctactcaggagcctgagcctggagaatcacctgaacccagatggcagaagttgcagtgagctgagatcgtgccactgcgcttcagtctgagcaacagagaagactctgtctaaaaaaaaaaaaaaaaaaaaaaaaaagactagaaaagtaaaatcatctataccattaacagccagagatggaaattctcttcatgtcttgatagattttcttgtcttatcatatacatatatatgtacatacagttcttaataatttgataccacagtgtgtatagaatgttttatactctatttactgttactttataagcctataccatttttatgcccttagttgttctttaaaaacttgatttttaatgaacttatatatatatgcactattaagtagaggtactgtaatctgtttattcagtctttttttttttttttttggagacagagtctcgctgtcacccaggctggagtgtagcagcatgatctcggctcactgcaagcttcacctcctggattcacaccattctcttgcctcagcctcccgagtagctgggacacaggtgcccacaaccacgcccagctacttttttgtatttttagtagagacagggtttcaccgtgttagccaggatggtctcgatctcttgacctcgtgatctgcccacctcggcctcccaaagtgctgggattacaggcgtgagccactgcgcccggccctattcagtctttttttttaaattattttattttattttatttttgagacaaggtctggccctatcacccaggctggagtgcagtggcgccatctcagcttactacaacctccatcctccaggctcaagccatcctcccaccttggcctcccaagtagctgggactacaggcatgcgccactatgtccagcttattaagtccttctctgaaggtcaatttctttctacctgtttgctgttaaaaacagggctacaggctgggtgtggtggctcatgcctgtaatcccagcacgttgggaggccaaggtgggtggagcacctgaggtcaggagtttgagaccaacctggccaacatggtgaaaccctgtctctactaaaaactacaaaaaaaattagccaggcgtggtggtgggcgcctgtagtcccagctacttgggaggctgaggcaagagaatcgcttgaacctgggaggcggaggttgcagtgagctgagattgcgccactgcactccagcctgggtgacacagtgagactgtgtctaaaaaaaaaaaaaaaaaaaaaaaaaaaaccagggctacaaagaacatctttggatgccagggctacaaagaacatctttggatgcctttctttataccttcctgattatgaggagatcataataccagtgaaatgccacatgtagacatttaaaattttgatctgcattaccaatttcccgtctgaaaaggttgctttttttccccatactcttgccaccataccccactggtattttcagtctcttaaatctttggtagtttcattgttaaactatgttttaatttttttttaaatttttttagagatggggcctcgctccatcgcctaggcaggagtgcggtggcacagtcatagctcactgcagcctcatattcttcttgggctcaagcaatcctcctgcctcagacccccaggtagctagaatgacaggcatgcaccaccacacccagcaaatttttattgtctttttgagggtgggaggcagatctcactgtattgcccaggctggttttgaactcctgacctcaagcagttttcccatttcagcctcctgagtagctgggattacaggcatgagacaccatacccagctctaagctatattttagtaatgtatattttgatattaaggttttttttttagctgattaaccagtctgagtgccattcattgagccagccctgatttttgaaggatatgttatgttacagtctcatttagatctgttccacacgttttgtttatgtcactttacttgaattgtaattttatctgagtatttgctatagccctgcccccctttttaaatttattggtcagtcttacatagttttcccccctcaaataaacattagagtcactccttagctaaattaaaagtctctttagaatttccattggaatgttattaaacttattaatttgaggtgatttggtatctacagttttgtacaattaaatataaggtggtatattgtgtgtgtgtgagcatatgtgtgtgtttgtactcatataaaagagaccagaaggaagtaagtgcttatttctgggtagaattaagaatgcattggccgggtgcagtggctcacgcctgtaatcccagcactttgggaggtcaaggtgggcggatcacctgaggtcgggagtttgaggcctgacctcccccagcctgaccaacatggagaaatcccatctctactaaaaacacaaaaattagccaggcgtggtggtgcatgcctgtaatcccagctactagggaggctgaggtgggagaatcgtttgaatccgggaggcagaggttgcggtgagccaagatcatgccattgcattccagcctgggcaacaaaagcgaaagtctgtccaaaaaaaaaaaaaaaaaaaaaagcatttatttcattttttaatgataatcctgtttttgtgtgtgtgtggctttttgttttttgtttgtttgtttgtttgagacagagtctcgctctgtcacttaggctggagtgcagttcattgcaacctccgcctcccgagttcaagtgattttcgtgcctcagcctctcaaatggctgggattacaggtgtgtaccaccatgcccagctaatttttgtatttttagtagagatggggttttgccatgttgtccaggctggtcttgaactcttaacctcaagtgatccacccgccttggcctcctaaagtgctgggattacaggcgtgagcccccacgcctggctgataattctctattttctatagtgttcatgcattattttaataatgatcgtatcttcctcaaaaatgtgatttttaataactggtggtgtgtgtatgatggttggatggtggggaaaggtcagtttggagggtcataggagtccagctagagtcatgaggacttggattatggtagtgcagaggaattcagtcctggacatgttctgcatggagaagcaacagcatctggggataacatgtacatctctttccagcctggctgtccggggggtttgtagtggtgttaaaccttctgcttgtgccctttataccaggcagcctgccgcctctcattgtgtatgaccggaatggattcagaattctgctccacttctcccagacgggagcccctgggcacccagaggtacaggtgctgctcttgaccatgatgagcacggctccccagcctgtctgggatatcatgtttcaagtggctgtgccaaaggtgagtcatctgttggggatttctcagtaatggctgtcgtttttgagtgccaggttcttttctgggacttacctgtcgagtgtcaaggaaagaatcttcactcaaactaactgaagataaagtgggaatgtaatggcttacctgactggggattcctgaatatctgacttcagatatgagtgaatccaaataggttcttaaacaatgccttaagaatctgtatctcttgactctgcttttctttggcaccattctgacagtttctccacaaacaggaaagtggctacccacagctccagggttgcatggtccttaaccctctttatctcagaaactctcaccgggcatgaagcacatatattgattacccaggaaagggctctgattgggcttgttggtgttacttccataccttggaccaggaacttgtatcctgggatatgagacacttggccaatgtgagataacatccatcccttttcaagggaagtggggccctactgattaacaggcaccccacagtcacaggggaaggggcctgtcctgaaaggaaaagattcgagacagacaaaaatatgacctgcagtctctacttcttacggtagtcctatgggcaatgttctgctactacctctgttttataagttaacccaaggctcagaaattaaatattttactcaaggtcacagagctagtgagaagcagttagaattcaacccaagatgtgccctggctgttgatgctgcgtctcagatgccggttattgaccacacaactcccgatccattctgtgtgtggaaggaaaggcctcttagatccttttatcaattagtgggagtctgtctgcttgggctcccataggtgcctcggggtaccacgtttaagagggccatttcctcttggaggggtgttggggaggtccagctccccctcacctgatctccatcctagaagctgtggttaggaatgagttacatgttggttttcttcccctgatagtcaatgagagtgaagctgcagccggcatccagctccaagcttcctgcattcagtcctttgatgcctccagctgtgatatctcagatgctgctgcttgacaatccacacaaagtatgttccagtgtctgtggtagcagggagatgggggcccctgaactgtaaggggaggtaactttgtgggtagagagaggcacattgaggccttgctctaaagtctctggtttgctgggcacagtggttcacccctgtaatcccagcactttgggaggctgaggcaggtggaccacctgaggtcaggagtttgagaccagcctggccaacatggtgaaaccccatctctactaaaaatacaaaaattagctggttgtgggggcacgcacctttagtcctagctgctcaggaggctgaggcaggagaattgcttgaacccaggaggtggaggttgcagtgagccgagatcgcactactgcactccagcctgggcaacagagcaagactccatctcaaaaaaaaataaagtcggccaggtgcagtggctcacgcctgtaatcccagcactttgggaggctgaggcagatggatcacgagatcaagcgatcgagaccatcctggccaacatggtgaaaccccatctctactaaaaatacaaaaattagctgggcatggtggcgtgcgcctgtagtctcagctactcgggagagtgaggcaggagaattgcttgaacccaagaggcggaggttgcagtgagccaagatcgcaccactgcactccagcctggtgacagagcgagactctatcaaatagatagatagatagacagacagacagatagatgaaagagagagagagggagggaaggaggaaaggaaggaaggagaagagaaaaagaaaagaaagtcagtctctggtttggttgggtgttaggggtatatgtggaatatccctcgctggagtctgtctttggggctcactgaaggaagatcagatggattgtcatagctggggaccaagggagggacacatgaactctccctaatcctctggagtcctctgaaaggacaaggtctgtcttccttagctggtctctgaattgcagcccatctcaggatttcaggactgcagaattatcgaagggttcccaggatatgtgcctgtttccccttgtttgtagtcccaaagagagtatcccaggtattttgtgtcagaattgtttgaaacactcacttgacttaacattgacccctgttcctgggttgctctccactgatttgacatcttctgtctcttctgtcccaggaacctatccgcttacggtacaagctgacattcaaccaaggtggacagcctttcagcgaagtaggagaagtgaaagacttcccagacctggctgtcttgggcgcagcctaacttttcacaagatggacccttcatttcaagcttaggctggcgttacttttgctgtctagtcaggactaatcacggtgtttcagtgcggagtgccaagagtcctatcctgacgtcaggctctgggtgtcaacctctgacttattctgcagatgctctgtgtgtgtgtgtgtgtgtgtgtgtgtgtgtgtgtgtgtgtgtgtgtgtgtgtgtgtgtgtgtgtgtgttcggggagagggtggtagcacagggcttgggatatcggcagtgtgggaaatgcgaagcatttctcatcatcaccatctctgctacagtcatgtttctgcatgtcagcgagcgacactgtccctgcctcaggttggaggttttatcagccaaagtgtttttttcatgtatcgttcgttccattcatccactctgtgccttgtcagcctttgaaaggcttggttgctcccaggctgctgttctcagggaccttaaaagggacctggttagtcttggggcagagagtatctacttgggcactctcttccaagaaagaccttgtctccattttcattagacaatgcttcttgtgtgtgttctggaagatcttctaaatggaatgcttgttgcactgttcccaggcgagtggctgccatgagacctgaggaccacacttgggggaccaatcatgtccttcaccactgtgccttagaatcgcccctggacagagttcctgggcagaggggaaagcagctcccaggccttactcaggcctcaggtccatgggttgggcagccagtctgggcccttctcaggatcctcatctccatcctcatcctcttccttcacagcatttacttggagctctttgtgacacaccatgtcagtcatgatgaatcggccaacagccagcccttgccagctgacgtcacagtctaagatgggaaactggtacagatagacatgaagagagcttagcagtgattgaggtggtgactaaatatacagtcattgaataaataccatgtagcaagtgtactttgtggagtgttgagtaagtggaaaatggaaagccagttgcatttagagatgataggcctaaagggaactgtcttctgtcgagaagtaaaggaaacttcatgaaggatgtagaagctt

SEQ ID NO: 702 - DNA, 864 bp, Homo sapiens
ggcacgaggcggggtagtcggcgcgaggcggagcttggcagttccgtccacttcagccgcagcgtccctcgccgggtgtctcgccgcagcctccggagaggaacagaccctcactctctctgtcagaaaaatgtctgctccagctcagccacctgctgaagggacagaagggactgccccaggtgggggtccccctggccctcctcctaacatgaccagtaacagacgactacagcaaacccaggcacaagtggaggaggtggtggacatcatacgtgtgaacgtggacaaggtcctggagagggaccagaagctgtcagagctggatgaccgagctgatgccttgcaggcaggagcatcacaatttgagagcagtgctgccaagctaaagaggaagtattggtggaaaaactgcaagatgatgatcatgctgggagccatctgtgccatcatcgtggtagttattgtaaggcgggactgaagagctggaagaaagcagtcagtaccctcccaacggcccccctcgaaggtctccactctcctctgggctcctccttgcctaatgcagggggtcaccgctggagaagaaccaccactgtcctcgatgtgtcccaagcctggagcgaatccgtcctcttggctctcccagccctatcacaggaatcattcctgggtttctgtccctctgaggctcaccaggtgtagttggccttgttctttgggggtattagcccttctactttctttctcacccaccctgtaccctcttctgtgtgtctctgctatccccctttcctcccaccacccatgtgcatgagcaaatgtgcaacaaaaccctgggactttgcagtcaaatgaagctga

SEQ ID NO: 703 - DNA, 180283 bp, Homo sapiens
gaattcattaaaaatttttttacggaaaagctcaaatttttcattttaaaatatttctcttttttcttttttcagaacatttctcacttacataagagcacattttctttctctttttttcagatagagtctctttgtgtcacccaggctggagtgcaatggcgtgatctcggctcactgcaacctccgcctcccgggttcaagcaattctcctgcctcagcctcccaagtagctgggattacaaacggctgacaccacgcccagctaatttttgcatttttagtagagacggggtttcaccatgttggccaggctggtctccaactcctggcctcaggtgatccgcctacctcagcctcccaaagtgctgggattacaggcatgagccaccgcgcctggcctttttttttttttaaaattccaacttttattttagatacagggggtacaggtgcaggtttgttacatgggtatattgcactaggtagtcatagaaccaattaggtaattttttaacccacactccctccctctctccccttctagtagtcttcagtgtctattgttcctatatttatgtccatatgtgctcaatatttagttccgttataagtgagaacattaggcatttggttttctgttcctacgctaattcatttaggattctgtcctccagctccatccatgttgctgcaaaggacatgatttaattttttttttttatggctgcaaaactatttatctttcacttcttggcttttaccaaaataaaatgtttcttttgaactataaatttataaaacatctcattgttctctgtatcataatttttttctttttttttttttttctgagacagagtctcactctgtcacccaggctggagtgcagtggtgccgtcttggctcactgcaacctccgcctcctgggttcaagcgattctcctgcctcagcctcccaagtagctcggattacaggtgcccaccagcacgccggctaatttttgtatttttagtagagacgaggtttcaccatgtttgccaggctggtctcaaattcatgatctcaggtaatccacccgcctcggcctcccaaagtgctcagattacagacatgagccaccacagccagcctttttttttttttttttttttgttgagatggagtctcgccctgtcacccaggctggagtacagtggcgctatctcagctcactacaactccagcctgggcaaaaggagcaaaactctgtctcaaaaaaaaaaaaaaaaagggcagagaactaatgcccagagtcaacctgcaattattgcagagtgggaagcagtagacagatgctcctgcctcctgtccttcaggtggaaagcgtctggagacattcagctctctcctcaggagggcctgggggaatcgaactccactgcacacaacagtgacatcactctttttttttttttttttttgagacggagtctcactctgttgcccaggctggagtgcaatggtgcaatctctgctcaccgcaacctccgcctcccaggttcaagcaattctcctgcctcagcctcccaaatagctgggatgacaggcacatgccaccacgccaggctaatttttgcaattttagtagagacagggtttcgtcgtgttggccaggctggtctcgaactcctgacctcaggtgatccacccacctcagcctcccaaagtgctgggattacaggcgtgagccaccatacccggccaacatcattctcttaaactggcctttcctccttcaggatctcacactccctatagcctcgcttctgctttctgggatcacctaaattaactacctacggccaagtcctgtctcaagctctgctgtcagggtcaccaaaattaagatcatccctttccatcctcctctccctataaactactgcccttcttccacaaactccttccacgccagcaaacccagactgtaacattaacacagagttataatccatccatatactggtctctccacattcctggagcacaaactgctaaagggtaggaacgctgtgacacgtttggttcccccactgtccagtgggagagagatatgtgagccagtcagcgctacaccgagttgaggcagccattgaggctcttcatgaattttcccgttttctgccttccaggcacatgataggatggaattcctcagccctcctgaagttaggccactgcaagaggcctaactggcttgctttggccagtgaaataagagcagaagtcacatgtgttgttactgtcaggcacaagtatttaactgccaatgtaacacaagacactccagcaccctcttttgatggagcctcctttgatctggatgcctgagtgactatgatgatcagagactctaacactcctactgacccaacagagagcaatagtgagaaataaaactgttgtgttaagctactgagattccagggttgtttgttactgcagcatgatgtagccatcctgactgatacaagctgagataggagtccatataaagttcacagggacacaaacaggggaatattaggtctctctagaagatcagaaaggtttcatcaatgaacttgagatagccttaaaagatgagtgtttacctgacaaggaagagatgcaagcatccaggtgagcaatgaaaccccagagcgcattaaaggaactgcaagttcaggacctttcagggctggggagggaaggaaggccacaatgacactagaccagggaggaaggagagaatgccttatggaagaaacagcatttacagcttgtaaggcgatttgctatatggaattttagataaggaagtgatatgatttgatttgcatttcagaaatattattctggaatcagtatgtaggggctggaagaccagttaagagacatttagagtcctggcaagacaacaggggctaaaagcaagcacagaaatgaggaagggaaagccagcaccaacgttgaggcatagaccacggggcccctgagccctcctctgactctcagaacacctgggtgtcttatcacattgcaccatgactgcttgttcattgtttttgttgttgttgttgttgttgtgatggagtcttgctctgtcgcccaggctggagtgcagtggtgtgatcttggctcactgcaagctccgcctcccgggttcacgccattctcctgcctcagcctcccaagtagctgggactacaggcgcctgccaccacgcctggctaatttttttgtatttttagtagagacggggtttcaccgtgttagccaggatggtctccatctcctgacctcgtgatccacccgtctcggcctcccacagtgctgggattacaggcgtgaaccaccgcgcccggccgattgcttgttcattaactatagtcttcttttttttttttgagacggagtctcactctgttgcccaggctggagtgcagtggcacgatctcggctcactgcaacctctgcctcctaggttcaagcgattcttctgcctcagcctcccaagtagctgggactacaggcatacaccactacgcccagctaatttttgtatttttagtagagatggggtttcaccatattggccaggctggtctcgaactcctgacctcatgatccgcccacctcggcctcccaaagtgctgggattacaggagtgagccaccgcgcccggccactcaggcaggatttctatgtgacagtcttgaggcagaattccttctctgggaaacctaagtctttgctctttaggccacaatatcaagagtaatctcctggctgggcgtggtggctcacacctgaaatcccagcactttgagaggccgaggcaggcggatcacaaggtcatgagattgagaccatcctggccaacatagtgaaacacggtgaatacaaaacttaactgggcgtgttggcatgtgcctgtaatctcagctacttgggaggctgaggcaggacaatcacttgaaccagggagtcggatcgcaggttgcagtgagccaagatcgcgcctgggtgacagagcgagattctgtcttaaaaaaaaaagggccaggcacggtggctcatgcctgtaatcccagcacttctggaggccaaggcgggcagatcacgaggtcatgagttcaagaccagcctggccaacatagtgaaatcctgtctctactaaaaatacaaaaattagccgggtgtggtgcctgtagtcccagctacacgggagcctgaggcgggagaattgcttacacccaggaggcggaggttgcagtgagccgagatcacgccactacactccagccagggtgacagaatgagactccatctcaaaaaaaaaagagtaaactcctttacttaacgtcagctgagtatagatggcaatgtctttgcttcgttttatttttttgagatggagtttcgcttttgttgcccagacttgcccagactggagtgcaatggcacggtctcagctcactgtaacctctgccttccaggttcaaatgattcttgtgcctcagcctcccaactagctgggattacaggtgcctgccaccacacccagctaatttttgtatttttagtagagatagcggttcaccatgttggccaggctggtcgcgaactcctcacctcaggtgatctgcccaccttggcctcccaaagtgctccaattactggcgtgagccactgtgcccagccaagatgtcagtgttatctacaaaatgccctcactgaagtatccagactacagtcaggcatggtggcatgcttgtagtcccagatacccaggaggctgaggcaggagaatcacttgagactgggagttcaagttcagcctggagaacatagtgagagtctatctcattaagataaataataatgcaaatgtgtatatatacagtgcccaagggcaccatagccttgccaaattgacacatcttttttttttttttttttttttttgtggaaacagggtttcaccatcttacccagagtggtcttgaaatcctgggctcaagtaatcctcccaccttgccctcctaaagtgctgggattacaggcgtgagccactgcgcttggcctgacacataaaattaaccatcacagagtcatcaatgtggtaaccaatctctctttttttttttttttcttttttgagatggagtcccgctctgtcactcaggctggagtgtagtgatatgatctcagctcactgcagcctctgcctcccaggttcaagcgattctcctgcctcagcctcctgagtagctgggattacaggcacacaccatcaccctggttaattttttgtattttcagtagagacagggtttcaccatgttggccagactggtctcgaactcctgacctcaggtgatccacctgcctcagcctcccaaagtgctcggattacaggtgtgagccaccgtgcccggcctggtaaccaatctctaaagagcacatggtaccacccagagagaatgagataaaggcctagaaggccaaaggcatcaacagaggaaaaggtcaagacaggaaaggagtgagggtttatagaacagactgaaattatagaaggaagggagcctggatacaggggtgtcatggaaaccagggaaaagcagtggatcaaacagtgtggtcaagtatgtcacagactgcagaaagctcaagtaagaggagcactgaataatatccattaaatttgaagcctttatatcttttttcccaagaagcaacagtctcatggctggtgtacaactgcttcagaaaatagtttagcattagcagggaagctgaacaggtgcagacctcaacatccagcaactccactcttacgaatatgtggatgcttgctactcagactgtggtccacagacagacagcatcagcatcagcaggaacttgtagaaatgcagaatctggccaggcacggtggctcaacgcctgtaatcccagcactttgggagactgcagtgggcggatcgcttgagcccaggagttagagaccagccttggcaacgtagtgacccggtctcaaattggaaaaaaaaaaaaaaaaaaaaagggccagacatggtggctcatgcctgtaatctcagcactttgggaggctgaggcgggcaaatcacctgaggtcaggagtgcgagaccagcttggccaacatggtgaaaccccatttctactaaaaatacaaaaattagccaggcgtggtggcatgtgcctgtagtcccagctacttgggaggctgaggcaggagaattgcttgaacccgggaggcggaggctgcagtgtgccactgcactccagcctgggcaacagagcgagactctgtctcaaaaaaaaaagagagagaaaaaaaaaaaaagaaagaaacacagaatctcaggccccacccagacctactgactcagactccgaattaaaactccagatgactcatgtgcatgctgatttcaagaagcatgtaatcttcaaacccttttgctcacattaaaagaattttgcaaattatgtaccccttgcatgtttttatgctgctatctaaaactttccccaaatgtttagttgcaaaagaatgccattccagtgtgttgtaaacatggatcttttttaaaaagtcttatttcactttttaaccattcccttcatgattcattttatttttttttttatgtatttatttgtttattttttgagacaagagtctccctctgtctcctaggctggagtgcagtggcgccatctcggctcactgcaacctccgcctcccaggttccagcaattctcctgcctccacctctcgagtagctgggactacaggtgcctgccaccacgtctggctaattttcgtatttttagtagagacggggtttcaccttgttgctcaggctggtctcgaactcctgacttcaggtgatccacccgctttggtctcccaaagtgctgggattacaggcatgagccaccacacccagcccaattcattttatttatttattttttattttatttttaagatggaagcttgctctgtcacccaggctggagtgcagtggcacgatctcggctcactgcaacctctgcctcccgggttcaagagattatcctgcctcagcctcccgagtagctgggattacaggcatgcgccaccacgcctggctaatttttgtatttttagtagagatgggggtttcatcatgttggccaggctggtcttgaactcctgacctcaagtgattcatctgcctcagcctcccaaagtgctgggattacaggcgtgggccaccgtgctgggctcatgattcatttttaaagtacatgattataatcttctttaacagtcagaaatttcacattgttctatttcttctgaattcttattttcatagttctatttctacccccaagacattatcctaatgtaatacattttgtgcttgaaagccttctaagcctgagcaacatggcaaaaccctgtctctacaacaaataacaaaaattagctgggtgtggtggcgtgtgcctgtagtcctagctactctggaggctgaggtgggaggatcacctgttcctggggaggtcaagcctgcagtgagtcatgattgtgcattccagcctgggcaacagagtgagaccttgtcaaaaaaaaaaaaatgagcaaagaacttgaatagatatttctccagagaagacacacaaatggccaacaaggacatgaaaagatgctcaacatcattagtcattaagtaaatgaaaataaaactataatgagtacaacttcatatcaactagaatgtctatttaaaaaaaaaaacaagccaggcgcggtggctcacgtctgtaatcccagcactttgggaggctgaggtgggcggatcacaaggtcaggagttcgagaccagcctggccaatatggtgaaaccccatctctactataaatacaaaaattagccaggcgtggtggcgcgtgactgtagtcccagctactcaggaggctgaggcaggagaatcccttgaacccgggaggcagaggttgcagtgagccaagatcgcaccactgtactctagccggggcaacagagtgagacgctgtctcaaaaaaaaacaaaaaacaaaaaaaaacagaaaataacaactgttggcaaggatatggagaaattgaagcttgtgtacaatctcctggtgggaacataaaatggtgcagctgctgtggaaaacagtttggcagttcctcaaaaggtttaacatatagggtgggcacagtggctcacgcctgtgatcccaggctgagaggaatttgggaagctaaggctggaggatcgcttgagcctagcagttcgagaccagcctgggaaacacagcaagacttcatctctacaaaaaaaaaaaaagaggtgggcgggggagcaaatgccatggctcacgcctataatctcaacaatttgggaggccaaggcaggcggatcccttgagctcaggagttccagaccagcctgagcaacatggtgaaaccctgtttctacaaaaatgcaaaaattagccaggcatggtggtgcatacctgtagtcctagctactcgggaggctaaggcgggaggctaagcctgggaggtggaggttgcagtgagccaagatcacaccactgcattccagtctggtcaacagagatcctgtctaaaaaaaaataataataataatacgttaaaaatttaacatataattgccatataatccaacagttccactcctaggtatatatccaaaagaactgtaaataggtatacaaacaaattctagtataagcatccaattaaaagacaatgaatgaattacagctacacaagtcaacaaaaccataatgttgagtgaaaaggccagccccagaacatgtacagtatgattcatctgtgtgatggtcaaacagacaaaactaaactgtccgggaaaacctacaactgcatagatactgaaactattacaataagcaaatgaagtatacacggtcatacctcagagatattttgggcttcgttccagatcccctcaataaagccagtcatatcaacaactttttggtttcccagtgcacacaagttatgtttacactgtactgtagtctattcagtgtgcaatagcatacgtctaaaaacaatgtatgtaaccttaattttaaaatactgtattgctaaaaaatgctaacagtcatctgagtctttagtgagttgtaacatttttgctggtggaggattttatcttgatatcgatagctgctgactgattagggtggtggttgctgaaggttgggatggctttgacaatttctttttttcttttttttttttttgagatgaagtctcatgctgtcacccaggctggagtggagtggtgcaatctcggctcattacaacctccatctcctgggttcaagcaattctcctgcctcagcctcccaagtggctgggactacaggcacccccaccacacccagctaatttttgtgtttttagtagagattgggtttcaccatgttggcccaggctggcctcgaactcctgacctcaggtgatccgcccacctcagcctcccaaagtgctgggattacaggagtgagtcaccccacccagccaacaatttcttaaaataagacaacaatgaaatttgctgtatctactgactctaacttttataaaaagatttatctgggccgagcacggtggctcatgcctgtagtctcaacactttgggaggccaaggcaggagtatcacttgaacccaagaattcaagatcaatgactgggcaacacgggaagacccagtcttgccacttttaattaaaaaaaaaaaaaaaatggccgggtgctgcggctcatgcctgtaatcccagcactttgggaggctgaggtgggcggatcatgaggtcaggagttcaagaccagcctggccaacatggtgaaaccccatctctactaaaaatacaaaacattagctgggcgtggtggcagacgtccgtaatcctagctactcaggaggctgaggcaggagaattgcttgaacctgggaggcagaggttgcagtgagctgagattgtaccattgcactccagcctgggcaacaagggcgaaactccatctcaaaaaaaaaaaaaaaaaaaaaaaagccagaagtggtagcgcacgcctgtagtcccagctactccagaggctgaggcaggagaatcacttgaacctggtaggtggaggttgcagtaagccgagattgtgccactgcaccccagcctggcgacagagcaagactctgtctaaaaaataaataaataaattagtccaggaaggtcgaggctgcagtgagccttctttgcaccactgtactccagcctgagcaaaagaaaccactttttttttttttttttttttttgacagggtcttgcgccatcacccaagctggagtgcagcagtgcgaacaaggctcactgcagccttctcctccctgggctgaatcaatcctcccacttcagcctgttgaatagctgcgaccacaggcaacaccacctcccacagctattttttttttttctgagactgggttttgccttgttgcccaggctggtttcaagtgatcctcttcccttggcttcccaaaagtgctgagtttacaggcgtaagccaccacacccagccttgtaccctcttatattttttaaattttgaacaaaactttacaatttgaatttggaattgtacttacacattttgaattttgaacaaaactacattttgaattttgaactttgaattttgagtttgtaaacaaaattttacaaactctaatgcttttattttgctttttttttttttttaagacagagtttcactcttgtcacccaggctggagtgcagtggcgtgatctcaactcactgcaacctctgcctcccaggttcaagcaattctcctgcgtcagcctcctgagtagctgggattacaggcatgcaccaccacgcccagctaattttttttgcattttcagtagaaacgaggtttcaccatgttggccaggctgttctcaaacttctgacctcaaatgatccggccacctcagcctcccaaagtgctgcgattacaggtgtgagccactgcacccggccctacaaactctaattcttaacttgacagctttttgtatttctgctctcacgaatgactccatgaaaaaaataaaatgaacaattttttttttaaacttgggatatggattaggtcatttgcagggacacaggcaggcctggggaggacaacctgatccaggcaggtatcacaggcccgaaagtcagttgctcaagcagcaaggatgacatagggtagcagagcagacttggtgaggctcagaggatagaatatttgtcgagaagtggaagagtctttttctgtctggaattcacaaggtgctgggagaatctgcctccatttccccagatagacctggatctgggcagagtcagcaagggtgtgtggaggacttggacgatggcaaaggtggtgggctgcagggagtaaattccctccgaggtaggagggggagggaagagtttgtctggaggcaggttgaggctgggagagggctccgaagagctagggataaggagctctgaagaaggaggaggagccagcattgaggagcagtcaagggggatggatgggagttcagaaaaggtggttttgcagatggatgggagtggtgcaggcactttgttttcacatggcttctttccccaagcagtaagccccttccaacattgccaaaacatcctgcagtttttaccagggttcctgcgctgagggcagagctgagtgcagatcaaaggagaaagagaaagaagttggaggttttgttgtaatgtaagacagtttcatcagcctatggatttaaaagtccaggctgacttacctcttcctttcctatagattgctcaggaaatatggttattctagtacgtgctaagcatcgttgtaaaaagtaagcccacagcctaaaatactttgaatgtcttagacaaatgtccaatgtttgctacggttttggattatcaaggccactccttacctctatgagtagccaagggtagtgctctaagctgtgagctagcttctctcagagatgcccacaaacataaacaccccttttcaaagtaagctgctatggactcataggactggaaaatacttcagagagtaatccctccattttattaaagagaatactgaaacctggggagccttgatgacttcaagatggactggaacctggaccttttgtctcctagttattccttgcatccctagtcaaattttatttcctttaaaaaatgtatttacttttatttattattatttttgagacaggtgtctcgctttgttgcccaggctggtctcaaactcccggccttaagtgatcctcccacctcagcttcccaaagtgctgggattacaggcataagccacagtgcccagcccagattttatttctaaagctcactaagaatcctaatttttttttaaaagacagggtctcattctgttgcccaggctggagtacagtggcactatcatggttcactgcagcctcaactgcctgggcttaagcagtcctcccacctcagcctctcatgtaactgggatcccaagcacatacacaccatcatgccctgctaattttcttattatttgtagagatggggtcttgctatgttgcccagactggtctcaaactgctgggctcaagggatcctcctgcctcggcctcccaaagtgctgggattacaggaatgaaccattgagcctgacccaaaaatcctaaaagtatctcctaaatttatctgttcttgacaccacaccaaggcatttggtactgcaagctaaggacaggaaagcccctggttttatactggcagaagttggggaagaagggacaaggatctagatgattgtaaaccccctggatgggatgcatgggaaatggctccacatcatctctccaccagactacatggaaaagagtttgtgcacctctgcttgtttttacgcagagttgtaactgggtgggctggacacttgaaggattcattggctgtcaactccacctgccaccaaggactacctgtcttgagccatgggctgagattaggccccctgtcccatctacattcctagaaaggaaaagtagcaagaaagggacaagaaacaaaattttacaaactctaattcttaacttgacagctttttgtatttctgctctcactggaatgtgaactattcttctgagaagtttggcaatgcggaaaagaagagatgagatagaaaaacagaatttttaaagttcttttgggtcaggcgcagtggctcacgcctgtaatcccaacactgtgggaggctgagcaaggtggatcacccgaggtcaggagttcgagaccagcctggccaacatggtgaaaccccgtctctactaaaaatgcgaaaattagctaggcatggtggcgggcacctgtaatcccagctacttgggaggttgaggcaggagaatcacttgaacctgggaagcggaggttgcagtgagccaagatcgtgctattgcactccagcctgggtgacaagagcaaaactccagctaaataaattaattaattaattaaaataaaataaaattcttttgaaaatttcatagtccgtttcccagattaggaaaaggagaacagagctattgtttactcagcaactactgcatgccaggctcatttaaacctcacattagccctgtgagagatcagggccttcaagataaaaatgctttcagatgagctaaggatgggcgggggagacaaagataaggacactgtgattcagagaattaagtaacttgcccagtgggcctcatttggtacaggaatagggcttttattttatttttttaatgatttgcgaatctggcagccttctgagccagagtaggctcagaaactcctaggaatgtggctttaagcctaggtgcgtctgacacaaaatcaggtgttcttcctcaaatctacaaggcctaaatacaaagagagcagtttagaacagactcttagattcaacagagggaactgggtgcgggcatacaaatcagagaatttaaaagaaaaaggcaaaaagtcaaggtaccacctaaacactgtctacgctgcctccaccctcctgccaaacagcatcccttgagttcaagaattcagtttcagctcaagaacaaactttttatgggtggatgctggctgagccaaagaggaattacttcaacaatcatttgttgcatgaccttttttggtgttttgttttgagaaggagtcttgctctgtcgcccaggctggagtgcaatggcgcaatctaggctcactgcaaccttcacctcccaggttcaagcgattctcctgcctcagcctccccagtagctgggattacaggcacctgccaccacgtccagctaatttttgtatatttagtagagtcagggtttcaccatgttggccaggctggtctcgaactcctgacctcaggtgatccacctgcctcggcctcccacagtgctgggattacaggcgtgagccaccacaccctccctattgcatgatttttatttgcaaaacaaaacccacaacataattcctgcaaccaagaagtttatagtctaatggggaaaccagatattgaacacataataagaaacttcatcagaattgaaatgtaaggaaaacgcactagtctcctgaaggacgtaaaaaagaaatccaattggcaggaaacagtggcatcttcacgcggacttggataggtggggaagtgggtgtaggtacgaggaagtggaagggaaggcaccagccttcaagacgctcctaagtgctgtcgctgaagctgtggagactataacttagtctgagagagacaagagaaagagaaggcccgggcgcagtgttgaagggaagttttgtttagagctggaccttgtcagtctggaggagaggtgaggaataagggggacggagcggtggaagattagagtagaatcatactaacataataaatcacatcattaaaattagtcctagggttaattatatactaaaggtgaaatgggcaaggtcatcgatagcacaagcggagggcgactgccttggcaagaagttgggatcaatcctgagaatggaggggagggcgggtgtgattttaaaggactgacatggagtggaggaaagttgagggcactggatcgtctggctttgtggaaagtgaaatcatatttcaggcctgaagggctgaggcggttactagctttacaagagttggaaaagcctgggaatgtgtctggagcaactgtgagcacactcagcagaggaggcaggcgtgggtaatagctaccaacagctctgttagccacggggcggatggggccctgagaggtgccacggatgcacccagggcagcgctcggcacagctggaccggagacgcaccacccctgggagcaggtggcagcgcccgcagccgagagaacgggtgcgcgcgcgcgctgcgggatgcggcgcgggcggggcgcggggacgcggagcgagtagcgccatgggcagccgggattggggggcgggcccgagtgagcgggcctccgcgcggcacttggcacgcacgcgcaaactggccgcggggcttggaggtacagaggagggggagcgagaaagaggggggtgtggaacgtatttccgctctggcggacaaataatcccggccaaagaggaggcaaggccgtccggccctttaaccgcgtgggggtgctggtgaagaaaggggggtcgggaaggggggatcctgctcctttaattccctcccctcttcctcctccccgagtcctagccgacgccgccgccgccgcgcgcgcggggcctggaacacacggcacgagccgcccccgcccctccccccttacgcccacgcggagccggccccgcgcgcgcgcgcgtcccgtgcatccccgcgcctgcgcgctgcccaggccctgcccgtgtgtgggggtcgctgccggccccgggggggggtggggaaaataagggattaaaaaaacagcgcgcggaaccgggccaggtgagaggagcgtgcactcagggtcgtggggctgggggggcgtgccacggagctctgagcgtgggggcagggcgtgcacggtgcgtgctggcggcgggggggaggacgtgaaaagcgcgtgcaaacgtgtaaggggggggcggaggaatgaggcagccggtaaagggggcggggtgagaagagcctgcaaccggggccaccttggagtccagagccccaggcctctggcccccctttttctccgtccttccaccgtgggcgcgcgggctcgccccatcctagcgggctgctgggctggggggtgtggacgccgctgccccgcccccgagaaccacgcctccctcctctcagagggacagcacctccccagggttggggaaactgaggaagaaatctgaagaccgggagatcggatgccggggggctgggcaagaatgggggcgagggtcctggagccttggcttcggagagccagagacctttgtctctgaccggtttccttcccaaccagggttgcccacccccgccacaatggcctctggggtggaagtcctgcgcttccagctgcccggccacgaggccgcaacgctacggaacatgaaccagctccgggcagaggagcggttctgcgacgtgaccattgtggccgacagcctcaagtttcgaggccacaaggtcatcttggccgcctgctcacccttcctgcgggaccagttcctgctgaaccccagctcggagctgcaggtctccctgatgcacagtgcacgcatcgtggccgacttgctcctctcctgctacacgggcgccttggaattcgctgttagggacatcgtcaactaccttacagccgcctcctacctgcagatggagcacgtggtggagaaatgccggaatgccctcagccagttcattgagcccaaaataggcctcaaagaggatggggtcagtgaggctagccttgtgagcagcatcagcgccaccaagtccctcctccctccagccaggaccccaaagccagccccgaagcccccacccccacctcctctaccccctccactcctgcggccagtgaagctggagttcccactggatgaagacttggagctgaaagccgaggaagaggatgaggatgaggatgaggacgtgtctgacatctgcatcgtcaaggtggagtcggccctggaggtggcacaccggctcaaaccccctggaggcctgggagggggtctgggcattggaggctccgtgggtggccaccttggggagctggcccagagcagcgttccccccagcactgtagccccaccgcagggtgtggtgaaggcctgctatagcctgtcggaagatgcagaaggggagggcctgctgttgattcccggaggccgggccagcgtgggggccacctcgggcctggtggaagcagcagcggtggccatggctgcccggggggcggggggcagcctgggggcggggggcagccggggacccctgcctgggggcttctcaggtggaaaccccttaaagaacatcaagtgcaccaagtgcccggaagtgttccagggcgtggagaagctggtcttccacatgcgggcgcagcacttcatcttcatgtgccctcgctgtggcaagcagttcaaccacagcagcaacctcaaccgccacatgaacgtgcatcgtggtgtcaagtcacactcgtgcggcatctgcggcaagtgcttcacacagaagtccacccttcacgaccacctcaacctgcactcgggagcgcggccctaccgctgctcctactgcgacgtgcgcttcgcccacaagcctgccattaggcggcacctcaaggagcaacacggcaagaccacggccgagaacgtgctggaggccagtgtggccgagattaacgtcctcatccgctagccgcgcaggcgtggaggccaggaggctggggcccctgggctgcgtggaaaaagggctctttggcccaggagaattggggggtggggggtctggggcagaaaggtaagagtgggaggctgagcagatgcacacatcctgagagagggaagatgattccttggagagacttgctcttgagagtgcaagaatctggagctgggaaaagggttcttggaggccaggggaatacggggtcccagagaaagatttccttctcttagaagtgcatgtatatgtggagggagggaaaagggtcctatagaatgagggaagacaaaaatgttttattcctggctaaggctgcccaggggaaggttctgacatttctcgagataagaagggttggggggtgggtgggaacagggagggaatttggcaggaggacatgctcctgcttagaatagacctggggtgagggagtggtaaggggaaaagattactgagtcccagaaaaggaagtgggagacagttcttgcatgctggggaaatgagactgcgagtatgaggcttgctgaaatttgagggagaacaaagtaagacgccaggtaagagaacgtggggtgcgcatcctgggtagatattgggaagtgggggtacaatagcaagaaacaatggatagtcatgggggtgggggggatagggcacttagaaaagaaagaacacaagaagggctgttgggagggagggagaggagtagagacatacagtattttttaagaaaaaacatattttttaggattttttctggagtttggggttttagtttttctgcttttgttttccacaaaataaaaaacaaaaaaaaacttttttttttcctttacactctggcaactgcgtgtacatgactatcctgccctagacagcctctccctgtgatgctgcgttcttaatacctagaggtcacaactctgcatatcccttgcctgaaggagcccagccctaaacatgggagaggagtgtgacaagtgagctcctctggtcagggactcccccaagtccccacccccagccctccaccagttctgcaatctcaacacttagccaggtacctcacagtacaagtgattggcagtcgtggggatgcacatgaactctatttgagggacttaggatcagtgctagggatgagctacaggtggccaacctgcccacggaaattgtaagcaggagtctgtttggtcatattttgtctggggtaaataggtcatgtcttcaggaaagctaaaaaaaaaaaaaaaaagctaagtttggattaaggtgcagggaaaactacaattcccagaaagctctggaatagttaaccaaagagaactacagttcccagaaggcctttaattggcctcaggtgccccacctgcctgtgtcaaatactgcgtgtgaaatcatacagatcttttccaaactcgaccaaaacgtaatacctaaagggatggtaccctaaatacagctatcgagattgtctatcttggtgtatatcatttatacttaaattgtccgctgggctatgacccacggagtacctgactgtgcttatgaagtgttcggcaaaaaaggtttacttactgcagtgtcaccagtcagtaatgacgttcgggccgctgggcttacctggatccctagtgcgtgtgaaggtgtaacacgcctgatataaacagaagagacatttagccacaggttttcagaagggcacgctgctccaggggacatgaagcagcatgctagaaccagccaagaataaaggtgtcctccgcgtccctatcgccccttcgtgctcgttagaaagagcaaaaaggcgaggccaaaactgaggccaagccttctatctggtaacccaaaaactagaaaggcagaaaagcaaccagaggcgggaaaagcccaaccaggccagaggaaatacagccgctgccgagagccgagaagttcagaagctccgcttgttacctaaaaccagatggggacagagacgccacacctgggcccaggcgtgtctcgccctcggtccctgcagaactgaggccaggaatgacaggaattctcccttgcagctcccagcttaggacagtcacagccatctccgaggccgctctcaggggaaaatggccaaaaagcatgtagcggctcctttaaggctcctcctcgccctccctccctcgcccacgtgacccggggcggccgcgcgccggctcggcccccagcgcaagcggcgatggcggcggcggcgggagctgcagcggcggcggccgccgaggtgcggaaggggagggggagaggcgggtgcatgcccgcgcgcgcgcccgggggaagcgcgcgcccgtgcaatgctccgggggtgcaacggggccggggggcccgggcgggacttgcagcaatccagggggccagcaccgggggcggatgaggggaccagggtgtgggaggtggggggagtgggcacggaggcgcgcgtgcagccgccggctgcccctgagtgggcgacgggcgccggggccccaggagcacgcgtgaggggcacgaggggccgtccaccgggctggggggcagcgggtgctggaggggttggtgcccggggtccccgcggcctgggggacaaagggggagcggcgcgtgcagccgggaggagggggcggggccggggcgcggaggccccgccccctccccctcctcttctctcggccccagagatgcggggtctaccgagagggagggggttgatgcgggcccgggggaggggtcgtgcggcccctccgggcagccgaggccgcggaaggggggggccccacagaggaagaggtaggccccggagcctactctctcttcccagggcccaggcatcctggaccccccaactctctactgggctgaccagccctcctgtcccttgtctcccctcccagggggaggcccccgctgagatgggggcgctgctgctggagaaggaaaccagaggagccaccgagagaggtgagtgcagctaaaacgggccccaattggaccgtcaccttccctaaacacaggatctcctgagcccttagctctgaactttttctcttcctctacagttcatggctctttgggggacacccctcgtagtgaagaaaccctgcccaaggccacccccgactccctggagcctgctggcccctcatctccagcctctgtcactgtcactgttggtgatgagggggctgacacccctgtaggggctacaccactcattggggatgaatctgagaatcttgagggagatggggacctccgtgggggccggatcctgctgggtgagaggctgggtagcctggggggttggtgggaaatttctgactcttgccttctttcttatcttgccttttgcttgcttgttttctaggccatgccacaaagtcattcccctcttcccccagcaaggggggttcctgtcctagccgggccaagatgtcaatgacaggggcgggaaaatcacctccatctgtccagagtttggctatgaggctactgagtatgccaggagcccagggagctgcagcagcagggtctgaaccccctccagccaccacgagcccagagggacagcccaaggtccaccgagcccgcaaaaccatgtccaaaccaggaaatggacaggtgagtgggatgggagagatgggataatcaaccataaacctttggtgagctcttttacagtttcacttaaggcttctactccatttactcattcacatatttaagcaaggggctgctgtgtgtcaaatattaggctgtgcttgatctgtgaaccaacagacaggttcctctcttcctgcagtttacattcttgggtggtgaaagtttgatgttaaagagtcaattatatagttaatgtcttaattactcttatgataatgacaaggtaagggaatttcaaaccactcttcctttctacctcaaagcaagcccttggggaactcatctgtcactgctctatttgtaaagtttttcctgggaatcccagtgggaaaggagatgagggccacagaaataatagaggagggaagtgacaagggcaccagaagctttatgaccaagttctagggttcttgggtcatacctattgttgacctaaaggaaaaaactgaggcaaacttaacattaagtaaagtatatttggtcaggttttgaggacagcctttaggagcaaagattcaagttgccgtgaaaatacactctgattagcagcagttataagtaggggtttttttgtttgttttgttttgtttttgaagacagtttcactatgttgcccaggctggtctcaaactgctgggcttcagcaatcttcctgccttgacctcgcaaagtgctgggattacaggtgcaagccaccacaaccagcccacaagtaggtttttaaaggaaaagaagattggatgacgtgaagatattgaaaaaaaacaggctgactctgggcacactgcgtaggagttagccctgctctggaaggagccgcaaaaagaaaaaaaaaaagataaaaattttttaaaagattgaagaaataacaaaggaaaagaagaggcagttcctaaattgtttaccagtttacattagaataacaagctattgatctgctatacattgttctttgtctcacagatattaggcacatgaagataatgggtgaagcagcaccctagtcaggtacaaaatgcctttaagcagttgcctccaggcatgggccctaaccgttccatgctgacttctcgctgagcctgatcaattttgcctgcttcacatagcacaggttgctatgagctacctttcctttctcactatgataaacattaatttttatagttgcaattcattttgtaaagaatagggaagaaaaggaaaattgaatttataaattaggtacagtgagagattaacaacaataataacataatagcgtaatcctaacagtaggccaggcgtggcttgcctataatctcaacactttcagaggccaaggccggcaatcacttgaggtcaggagttcgagaccagcctggtaaacatgtccaaaccccgtctctaactaaaataataataataataataaattagccaggtgtggtggcgtgcgcctgtaatcccagctagtcgagaggctgaggcaggagaatcacttgcagtgagccaagatcgcgccactgcggttcagcctgggcaacagagcgagactcaaaaaaaatagcacaattctaacaatatgccaccatcactgctgatgaactggataagaggggactagtgtcacgtaaaatttaccatctaaaaaacaattttaggccaggcgcagtggctcacgcctgtaatctcagcactttggaggccgaggcgggaggatcacctgaggtcaggagtttgagaccagcctggccaacatagtgaaaccctgtctctactaaaaatacaaaaattaggccaggcggggtgcctcacgcatgtaatcccagcactttgggaggccaaggcaggtggatcacctgaggtcaggagttcgagaccagccggacgaacatggtgaaaccccatctctattaaaaatacaaaattagccgggcatggtggtacatgcctgtaacagtccgctacttgggaggctgaggcaggagaatcgcttgaatccaggaggcagaggttgtagttagccgagatcctgccattgcactccagcctggacaacaagagcaaaactctgtctcaaaaaaaaaaacaaaacaaaaattagccgggcgtggtggcatgtgcctgtagttccagctactcaggaggcagaggtgagagaaacgcttgaacctgggaggtagaggctgcagtgaactgagattgcgccactgcactccagcttgggcaacagagtgagactccatctaaaaatttaaaaataaaataaaaaacatttttaagtatataatttaatggtattaaatactttcatcatgtgcaatcatcagtcaccataactcatcttgtaaaactgaaactctgtacccattaaaacataactctccattccctccaccccctagcccctggcaaggaccactgtcctttctttctctataaatttgagtaagtactttatctaagtgtaatcatacagtatttatccttttgtgactggcttatttcacttagcataatgtcctcaaggttcatctatgttgtaccatgtcagaatttctttcctttcacctgggcagcataccaagaccccatctctaaaagaagtttaaaagaatgtttcaaaggccaggcccagtgactcacgcctgtaatcccgtactttctggggaggatcacttgacaccaggagttcaagaccagcctgggcaacatggcaagacctcttctctaccaaaaaaaaaaattaagaagacattagttaggcattgtgacatgtgcctgtaatcccagcttcccaggaagctgaggcaggagaatggcttgagtccagttcgaggctgaagtgagccatagtcatgccactgcactccatcctgggtaacagaatgagaccttatctcttaaaaaaagtatatctttcctttttatggctgaatgttattccattgtgtataaatgccacattttgcttatccattcatctgtcagtggcacttgagttgcttccgcacctcagctgttgtaaacagtcctgctgtgtatatggccacatataaaaggtcttttaactttattaagctttgttttctcatctgtaaaatggaaaagggcctgctctgcatggttgcagagatgagtgagtgttagtgtgcttgacactcttcctctgaggaaatagcacccgtggttgccagtttgtggctactggagcctcacatggcatttggaggtgtggctcactaccccacccccgcctggggctccaggctaacccaggcaaaactgtaggtgctctctgaccctcagtgtgctccctctcggcccacagcccccggtccctgagaagcggccccctgaaatacagcatttccgcatgagtgatgatgtccactcactgggaaaggtgacctcaggtcagtcccatcccccacccccggtggcttgatgtggtctgttctgaaggtttcggtgataggccccacaccattctctctcttcttccagatctggccaaaaggaggaagctgaactcaggaggtggcctggtaagcagcagaggcagagcctctacccctcgggggctgctctgagggagggtcagaggtggggctgcatcccatcctcagtagaaatgcgcagggtgtcagtggcctcaatttttctgatctttttctagtcggaggagttaggttctgcccggcgttcaggagaagtgaccctgacgaaaggggaccccgggtccctggaggagtgggagacggtggtgggtgatgacttcagtctctactatgattcctactctgtggatgagcgcgtggactccgacagcaaggtgagacagagctggtctgccctccccaccggtgctcccccagggctggggctcactgtccagtcctccttgttccctgtttttctgctttctgtcctttttatcttctgaatatccactaagtcattgccccatgctgtctataactccttttttttgtggggggagacggaatctcattctgtcgcccaggctggagcgcaatatcacgatctgggctcactgcaacctctgtccccagggttaaagcaattctcctgcctcagcctcccgagtagctgggattacaggcacctgccaccacgcccggctaatttttgtatttttagtagagacggggtttccctgtgttggccaggctggtctctaactcctgaccttagttgatccacccaccttggcctcccaaagtgctgggattacagctgtgagccaccgcgcccagctgtaactcattttcaatgtgtattctgcccgtttcatccacaaaggtggccaccaccctgcacatgggatttagtattcttttttttttaatcagctaatgaaatgaccatttaacagacatgtactgtttaaaaaaagaaaacaaaaaaagaaatgaccagaaagcacttttttaaaacatacgttatgctgtttatataaaattcaaaagcattgcattgtcatttatttgcttatttcgttgctctttgtctggttttatcttatatgtttgcctacacagtagaatgtttagtctctctgattttgccttttatttaacattttatcatgaaaacttgcaagcataatcaaaagagtagaatagggagcccccatgtacccaatacacagctccagccattatcagtacacagtccatcttgacccatctgtacatctcccagcacacacacctactaggttattttaaagcaaatcccagacctcatatcattttacctaaacatatatccatatagatttgtaaatataaggcctctttttgtcgttcaacatcattacactactgttttcacacctaaaaaaacttaccgatttcttaataccatcaaatatcctgtcagtcttcacatttcctcagctctcacaaatggtttttgtcaagatccaaatgaggcccacaccttgatttgattaacatttgtcttaggtcagccaggcacagtggctcacgcctgtaatcccaatactttgggaggccaaggcgggcagatcacgtgaggttgggagttcgagaccagcctgatcaacatggagaaaccccgtctctactgaaaaaaatacaaaattagctggacgtagtggtacgtgcctgtaattccagctactcgggaggctgaggcaggagaatcgcttgaacctgggaggtggaggttgcagtgagccaagatcgtaccattgcactccagcctcggcaacaagagcgaaactccgtctcaaaaaaaaaaaaatttttttttgtcttaggtctctctcagtatttaggtttccccatcttctttgtgtttgtttgtttgtttgtttttgttttttgagatggagtctcacactgtcacccaggctggagtgcagtggcgtgatcttggctcactgcaagctccacctcctgagttcaagcaattctcctgcctcagtctcccaagtagctgggattacaggcacccaccaccatgcccagctaattttttgtatttttagtagaggcagggtttcactatgttggccaggctggtctcaaactcctgatctcgtgatctgcccacctcggcctcccaaagcgctgggattacaggcgtgagccaccacacctggcctgatttcctcatcttctaaaaaaaaattttttggcccaggcgtggtggctcacgcctgtaatcccagcactttgggaggcaggtggatcacctgaggtcaggagtttgagaccagcctagccaacatggtgaaaacacatctctaataaaaatacgaaaattagctgggtgtggtggcgggtgcctataatcccagctactcaggaggctgaggcaagagaattgcttgaatccaggaggtggaggttgcagtgagctgagatcacaccattgcaatgcagcctgggcaacaagagcaaaactcaataaataaataagaaagattttttttttttgccatttatttgtcaaagaaaccagctcagttgtcctacagaatttttcacatttaggagttggctgattgggtggagattgacacatcctctctgcccatatttcttgtaaactgatagatctagaggcggaatcagcttcaggtgccaagaagacttgacagtgggtgcaagtgcttctggccacatcacatcaggatgcatggaacatctaatctggtcatttttcttgttagtgataagattgaccagtgggttcaggtgatgtcagcctgaacctttcatataaagtttctcatgagctttgtgtctagtgtttttagcaaccattggtggtcttgcctgtttatgaacatcataaaaggggtatcaaagtatgtttatcttctggtacttgctttttgttttttaacttaatatcacattaccaagatctgtgcacattgctgtctgtaactttttcactgctgtgtaatattccatgcaccctctctttatgtggccctttgtctcctctgctacccacacttatccccagcagccatccgtgggtagtggcggggggcaatggtggtggtggttttctttactcacctcattgtctgagtcctgggggttggatatgtctgttctgcctctctcccagtctgaagttgaagctctaactgaacaactaagtgaagaggaggaggaggaagaggaggaagaagaagaagaggaagaggaggaggaagaggaagaagaagaggaagatgaggagtcagggaatcagtcagatagggtaagagacggaggctgatatctccagaggagtgggagactatggggctggaggtctggtcctgaaggtgttgggggggcccctgggggtgagggttcctaactcctcctcctcccccttcccagagtggttccagtggccggcgcaaggccaagaagaaatggcgaaaagacagcccatgggtgaagccgtctcggaaacggcgcaagcgggagcctccgcgggccaaggagccacgaggtgaggaggctctgctgcttttgggtgccctccagcccccgcccggccccccagagtgtgtgcacgcacacacacgctctcgcatgtccacctgcatgtacccacgcgtccaggcacctgtgagctcgcactctcactctctctgtctctgtgtcaggagtgaatggtgtgggctcctcaggccccagtgagtacatggaggtccctctggggtccctggagctgcccagcgaggggaccctctcccccaaccacgctggtaattgccaattgccgggacagggagccactagggggcgacctcagggcaggagggaaagggaaggaggggaaccacgccagagccggggtgtccatggccaggctttaggggttctggggcatggcggggtggggtagggagggagtgagaggacccgccaggggtcccagtaggtgaggtgcagagcctccctcagctcctcttttcctccatccaaggggtgtccaatgacacatcttcgctggagacagagcgagggtttgaggagttgcccctgtgcagctgccgcatggaggcacccaagattgaccgcatcagcgagagggcggggcacaagtgcatggccactgagagtgtggacggagaggtggggccgtgggctggtgggagaggtgccagggcgtccagtccccggccccagcctcacgctctcttctcacccatcctcactgcgcacagctgtcaggctgcaatgccgccatcctcaagcgggagaccatgaggccatccagccgtgtggccctgatggtgctctgtgagacccaccgcgcccgcatggtcaaacaccactgctgcccgggctgcggctacttctgcacggcggtgagtgaccagtggggcagacaggtagcatgccctgtggcagagggggccccagtaacctgaccatgttgtttccctgctcccagggcaccttcctggagtgccaccctgacttccgtgtggcccaccgcttccacaaggcctgtgtgtctcagctgaatgggatggtcttctgtccccactgtggggaggatgcttctgaagctcaagaggtgaccatcccccggggtgacggggtgaccccaccggccggcactgcagctcctgcacccccacccctgtcccaggatgtccccgggagagcagacacttctcagcccaggtactggcctcccccttctgtactgtctgttccctcccccacccctattgctcctggacatgagctccttcttccacagtgcccggatgcgagggcatggggaaccccggcgcccgccctgcgatcccctggctgacaccattgacagctcagggccctccctgaccctgcccaatgggggctgcctttcagccgtggggctgccactggggccaggccgggaggccctggaaaaggccctggtcatccaggagtcagagaggtgagtggggagttgctcaggcacagcaactggggctgaggccagaggagtggtgtcgaggctgatgctggaatctgaggagctccccttctctccccgctcccgtgctcccttggcaggcggaagaagctccgtttccaccctcggcagttgtacctgtccgtgaagcagggcgagctgcagaaggtgatcctgatgctgtgtgagtgccacccattccttcagcagaccttgaccaagcttcatgtatataccaggcactgggtacagggccaggagtacagtcgtgaaggacacagtccttgccctgaaggacttagtgtggtggggaaaagacacatgtaacccataacgatggggatgtggtgactcataggtgctgggtcctgttctgagtgcttatacctgttagccttggcttgcacagagaggttagggaccttgcacagtgcacagtggtactgagaagcaaggcagggtttgaattcaggcagagctgatgcctttgactccttattctgataaatgctgtggtggaggcaagctcggagaatgccaggaggggccctgatccagcttggggccctgagaagccttcctgaaagaagtgccacctgccccctagcttgcttaccacttgtccctccctctcccggtgtggcgggctctccccgcagtggacaacctggaccccaacttccagagcgaccagcagagcaagcgcacgcccctgcatgcagccgcccagaagggctccgtggagatctgccatgtgctgctgcaggtcagcacgggcccggccccatgcctcattcaccaggcccttaggcccctcccctgccccatgcctccctggtgccagccctcctgccccctcacaggctggagccaacataaatgcagtggacaaacagcagcggacgccactgatggaggccgtggtgaacaaccacctggaggtagcccgttacatggtgcagcgtggtggctgtgtctatagcaaggtgtgcgcgcaggcagcagggcgtggcccccggagtcagggaccaggtttggggtgccagcccaaaggctcatttgcccgtgtctccctcaggaggaggacggttccacctgcctccaccacgcagccaaaatcgggaacttggagatggtcagcctgctgctgagcacaggacaggtggacgtcaatgcccaggtcagcggcccacccagcccagcccctctgggtccctggtgcctgggttccttggcttggcctcaggctttgggccgcctttcctacatctgacctcacactgctcgtgtctgtcctcattgctttcttcttcctcatttgtatttctcttcattcttttctttctcgtttctttctctttatcaagtttcagaataatcagttcctgtcttaatctctgaaagtgtccagtgaggctttttattaactcttgggttgtcatacattggatgtgttttagtcatttattggcattcttctcagtctttgaattattccatcattgtccagaagaagcccctttaagaggcctctgtggctgtgacatgacccagtggcccagtggcctttgagagcctcctgacctttcagcacatttcctgcccccaactcagaatccaccatttctctaagaaactctgcttcctttatgggaaacttttttctttttttttgagacggagtctcactctgttgcccaggctggagtgcaatggcgtgatcacagcttactgcaagctccgcctcccaggttcacgccattctcctgcctcagcctcccgagtagctgggattacaggcgcccaccaccatgcccggctaatttttgtatttttagtagagacggggtttcaccatattggccaggctgatcttgaactcctgacctcgtgagccacagcgcccggccagaagcattttttagagaatacaatctatgttcctaggagtgtttattgttattgggttgtcgctgcttctaggacttttgagtgggcagacttaggaaatttttgttcgttttttcttttaagagacagggtcttgctatgtcacccaggctgaagtacagtagcagttcacagacagtcatagctctctgcagcctcgaaatcctgggctcaagcaaccctcccatctcagtcacatgagtagctgggactacaggcatgcacctccatgaccagctcctggctgtattttttggaaagagaacaattactttattttctctctggcatcagatggtagacgctactagtcccatttttgtttgtttgttttttgagacggagtcttgctctgtcgcccaggctggagtgcagtggcacgatcttggctcactgcaagctccgcctcccgggttcacgccattctgcctcagcctccctagtagctgggactacaggcgcctgccaccacgcccagctaattttttctattttttagtagagacagggtttcaccgtgttggccacaatggcctccatctcctgacctcgtgatccgcccgcctcggcctcccaaagtgctgggattacaggcatgagccaccgcgcccgaccctactagtcccattttttagatgaagaaactgcgacccagagacgttaagtgacttacccagggtcccacagcttgtgaatggtggagctgggattcacacacacagccaatcttgaccatttgctgctttggtgagcagggccagctgcccccaccctcactcccttcccacccacaggacagtggggggtggacgcccatcatctgggctgcagagcacaagcacatcgaggtgatccgcatgctactgacgcggggcgccgacgtcaccctcactgacaacgtgagtgagcgtttggttgaggtagggcagccccaggcccctgagcaaggtggaggctggattcaagggcccagctgcctgcacctcatctgttcccctcctacctccacaggaggagaacatctgcctgcactgggcctccttcacgggcagcgccgccatcgccgaagtccttctgaatgcgcgctgtgacctccatgctgtcaactaccatggggacacccccctgcacatcgcagctcgggagagctaccatgactgcgtgctgtgagcccctgccccgcccttgatgcccctgcccccacttcttgcagcctcagaccctgcattgggcatcctgtcccctcttcaggttattcctgtcacgtggggccaaccctgagctgcggaacaaagagggggacacagcatgggacctgactcccgagcgctccgacgtgtggtttgcgcttcaactcaaccgcaagctccgacttggggtgggaaatcgggccatccgcacagagaagatcatctgccggtgagccctgggcccctctctgcacccaagaccacctcctccccacccataccctccccaggctccattgcatcctcacaacattccccaacccctccccatgcaccactgaatccccagaaccacccacaggccccctccccactagggttgccagatacagcaaataaaaatagaagacacccagttaaactggaatttcagatgcacagatgcatacttttttagtgtgagaatgtcctgtgtaatttttgggacatactaaaaagctatttcttgtttatctaaaattctatgttaactcgctgtcctgcatcttacctggcaaccttactcccctgcccccagccccaggaacctccccaactctcttccttatacctggagtagctcctcacccccttttccagcttcccagccccttcttcccgtcttctgcagggacgtggctcggggctatgagaacgtgcccattccctgtgtcaacggtgtggatggggagccctgccctgaggattacaagtacatctcagagaactgcgagacgtccaccatgaacatcgatcgcaacatcacccacctgcaggtgagtagggggcccggggcctccccaaaaggacaccgagagctgccaagtacagttggacaagcttcaaaccagcaaaggcacctggccaaggaagggttggctgaaagggagccctggtgtggggtcgcatccccaccaggggagggatccttttcctaggtcacagcaaggtatcatatgagctcccagtagccctggggacaccaccatactgattacccgtcaccctaggaccatcaccacccactgttgtaacacatggaccccaaagaaaggacagtggttagggggtcagggggcatcaagagtagaggggcccagaccgatcatggggttgagctgacctctgcctcctcgccccagcactgcacgtgtgtggacgactgctctagctccaactgcctgtgcggccagctcagcatccggtgctggtatgacaaggtgcgtgccccttgccttggccacagacacccggcccctccttcagaggagccagcctccaataaaccagctccctgggaccatgtccctcacctcctaccctgtgggggaagtgactgagaggactgggcaaggcctgggaatcctgggatgtggctgggacagcgatgggcgtgtgcccaggtctatgcaaaccagggatgatgctcctgcatttcgtgctctcggatctcagagcctgtgtgacctccccaaccccaacttccctgtctctgtagagtcttggggttcctgggtgggcagctgaggtgggccccacagagaaaccactatcctcccctccgcaccctaggatgggcgattgctccaggaatttaacaagattgagcctccgctgattttcgagtgtaaccaggcgtgctcatgctggagaaactgcaagaaccgggtcgtacagagtggcatcaagtgaggccctgctccacagcccaccctctccccacctcaccctttcctccctgcccctggggcttttccagggcctccacccaacagcgccatctctcctacccccagggtgcggctacagctctaccgaacagccaagatgggctggggggtccgcgccctgcagaccatcccacaggggaccttcatctgcgagtaagtcaccgggagcaccttaacacctggtgggaaggggatacatggccactgctgactgccaggcctccctctcagccatctgccctgatgagtcacatgtctccatctggccactctccagccagcctcctctgacccctgttcctgcagctgagcagccagccgcctctgacccccatccccccagctgagaatggcacctgcctccactctgcccagaccacagagcttgtcttccctcccctccacctccaccctctaccttcccctccaccccctcctcgcccttcctagctggagaaagtgccagtttgggagacaaacagacttgggtttgagcccctctctgcttctggatgttcttggccaagttacttaacctctttgagccttatttttcttgtctgtagagtggaggtgataacagctacctatctgtccacctcctcaggggcctgtccctctccatcagttctttctctgcccagcatctgtaatctccccctttctcttggctgccatcccacaaccctcaatcttactttagtctcctttggctcttttttttttttttttttaatttattttttgagacggagtttcactcttgttgcccaagctggagtgcaatggcacaatcttggctcactgcagtctccacctcccaggttcaagcgattctcctgcctcagcctcccaagtagctgggattacaggtgcgcaccaccacacccggctaattttttgtatttttagtagaaacggagtttcaccatgttagccaggctggtctccaactcctgacctcagatgatccgcccacctcggcctcccaaagtgctgggattacaggcgtgagccaccgtgcctgaccattctttggcctttaaaaaagatagtcctctaaccatacttgcctgttcaacagaccatccagtttctttccatcatgtcatctctcaacttctctggcaagcagccccttcctgctgggcctcagtttccccaccatccactcactgcctgtccctgccaaaatcggcctttgcccttcccactctgctgaagctgtctcttgacagtcacttcccacccacgtcctctccgtgtgtctgaatctcccatgtctgctcaccctccttagatagctggctcctctcctccctctggtgtccagatatgtgtgggtgctcttgccccgaatcatgccttgagttccttgccactcctgtacctctggctcttcctgcagtcctggcccctctcctgttccatatcgcccattcctgccgggtggctcctggaacacaaacctctctgtgtccaaacccgaacttccccacccaggccaactgcccctacacattaatccccttaaccacagagcttgttgtctgtctctgtgctgactgaaggcttcctctgtcaaggctggaatgctgccctttcacttgcccaccactgctgctccaggccttcccttccccacacctgccagccctgcccattccagattccacaggcttgtgaagagagatggggcctggagccacctcctaatagcccacactcaccttcagaaccatggattcctgtcccacaggtatgtcggggagctgatctctgatgctgaggctgatgtgagagaggatgattcttacctcttcgacttagacaacaaggtgagcaggagaccctccttaccctgctgctccccagggctggctttcaggagcctctgggaagtcagcaaatggaaacctggggaggagggactggggagtcagtgggtggggagggcaagcagggtcgggggagatgtgaagagtgccatccccctgccccaggatggagaggtgtactgcatagatgcccgttactatggcaacatcagccgcttcatcaaccacctgtgtgaccccaacatcattcccgtccgggtcttcatgctgcaccaagacctgcgatttccacgcatcgccttcttcagttcccgagacatccggactggggaggagctagggtgagactctaggggtctctaggggctctgccagggggtgggagatgcagcaaacctgggacctgaaggctggcatgtacctggtgtccaggcatggagtagtgcagagcttctcagatttcagtgtacataagtatttcctggaggacttggggaaacagtcctgtgcctcccagagagattttgaatcagtaggcttgggatggggcccaggattctgcatttctaacaagtccccaggcaatgctgatgctgaaagtccatagaacatacaaggggctcagatcccatctggagaagataggttgggtgtcgggtccctctcagggagcaggatccacagggtcttcggggtgggctcttggtggctgggtccaggtcccacaagctcctgttttcctctgacaggtttgactatggcgaccgcttctgggacatcaaaagcaaatatttcacctgccaatgtggctctgagaagtgcaagcactcagccgaagccattgccctggagcagagccgtctggcccgcctggacccacaccctgagctgctgcccgagctcggctccctgccccctgtcaacacatgagaacggaccacaccctctctccccagcatggatggccacagctcagccgcctcctctgccaccagctgctcgcagcccatgcctgggggtgctgccatcttctctccccaccaccctttcacacattcctgaccagagatcccagccaggccctggaggtctgacagcccctccctcccagagctggttcctccctgggagggcaacttcagggctggccaccccccgtgttccccatcctcagttgaagtttgatgaattgaagtcgggcctctatgccaactggttccttttgttctcaataaatgttgggtttggtaataaactgcgatttttgtgttggggtggggagaaagcatacttggctagagggaatgtgggtccaagggccagaataggatgggaagcaggctggacaggtgtggctggtgtgatggccgcccagtgcggggcagggaggtggggggccactatgaagatccagtttcacaggcacggtggctgacacctataatcccagcactttgggaggccaaggcaggcgaatcacctgagatcaggagttcaagaccagcctggccaacttggtgaaaccccatctttcaaaatagaaaaaatttgctgggcgtggtggcaggcacctgtaatcctggctactccagaggctgaggcaggagaaccgcttgaagccaggaggcggaggttgcagtgagccaagattgagtcactgcacaccagcctgggcaacaagagcgaaactccatctcaaaaaggaaaaaacaggtccaatttccacactttaatctttggcgggagcgtgttgggagtgtacggcagttaaggtagtttgcgagattataaagcgttttcttatcagagcatgccaggtcgttcactgtggtccgtagtgcccccaggaaatagccctgagcccccgtcccaggctccagctccccagcccgctgggcacaaagttgagaagaaggaactagagtgtgtcggggaccacaggcgggggtggggctgtgacgtgtgggagggcggggcgggcagcaggtgagacgccaggtctccagggctccaatcactccggagactgagccatggggggaaagcagcgggacgaggatgacgaggcctacggtgagactggggcgaggcccgggaccctgtggagggaggggaggacgggtactttgggaatggtgtctggggctggctccagggagaggaactaaggagagtactgtgtccctgaggggagggcccgggaaccgggagccatggagggagggagtcagggtcctgggaggaggatggggcccgggggctggggctgttgctggggagcccatggggagtgaagctgggtgcctctgaagagttggggctgaggtccttgggaggaggggggtatttcaggcctggactctgggtccctaagggcagggccctaggaaacaaagccgagatggaaggtggcaggttggggccctgagcagaatagggctggatgctgggagtgtcctgtgctgcagagcctgcaaccagtgaggccagggtccctgtaaggaggaggaggttcagcctggagtctgggtctctgagggcgaaagctgcttgtggcctgccggctcccttgaggagtgaggggaccctgagtgggctggcctctgcctgccagggtctctgggagaagtggcagagggagtgggttctgctgggggtccctgtgaggagttggggctgagggtctttgtggaaagggggctggggtcctgcctaggggtctctgtgaggagctaggagcaggagctggtcttggggtactctgaggaatagggacagggcccctggggttcctgtgaagggtgaggcctgaggggagaaacagcagggagcctgtttccagaatctgcaaggaaaaggggctggggttctgaggagagagggagctggggactggcctccagatccccacgagcagtgaaggctggggactcacctgcggaggcccccctggtcttctggtctgaaggggaaggaacccctatgagggaccttctcgaggagaggcttgagtcccttagggccataggggagcaggcagtgaggactcccgagtagacttcctggagcggcttcaggtcaatcattgtccatgagccatggagggacagagtccagcgcacctggggaaagtggaccccacccgctccttcccagactcctgcccagccctcggctctccctcctcagtgcccacaaggaaccctgactgcccagccctcctcctccctgtgtgtgtactcagggaggaccaggaactcaacgtgcctgcaatctctatggctgggctcaggtgtcactctgactgctggcccagagcccggagcacactgtggccaggggactgaggtcccaccagagtgaggatgtacagggccgcttccctccccaggccctgctggggttgacacctttgtctccagtttctttccccatagccttgaaccagagggtaaggtagggcctggggcagataggggaagaggccatgacctccctgaggggctgtgggtctgtgtggtccctggggagggattagggaggaggcagggatgagaatgagggagtgagagccactgggagtcccacatcccagctaaagggagactcaggagaaccgtgccagggtagggcaggggaccaaggccatttcccagactgactgccttgagatgtgagccggaaactataaaggccttccttcccctccccatggcagcctgggtggagctcccagggagctgctgagctgctgaccaggcctggatcctacctttcctgctccccagttttcccctcctgccagtcctgccctagcccatctccctccaaacacctgaggcctgggtaggatcctggggctaggaggactcagcaggacaagatatgcagagagagactcatcctccacacctcttctcatgtccctcagggaagccagtcaaatacgacccctcctttcgaggccccatcaagaacaggtgagctctgggcactgctccgggggctggcgggggtggtgggtgcagtgtggaatccagtatttgctttgtatttgctaaaatattagtaggaaacttgtgaaaaagagaaactcctgccccagatgggtggtgccctggggggattgttgtgtctggagcaggcatcgagggcttcccagttctggggggatgttctgtttcttgacttaagtgccggcttcacaagcgagagaactcacccagctgagcccttgcgagttgtgtgcttttctgtcttttacttcagaagaaagtttacccacccagaaaaaggttttctttctttttgtgttttggagatgggggttcactgcaggctcgaactcctgtgctcaagtgatcctcctgccctagccttccgagtagctgggactacaggcatgcaccatcacaccaggctaatttctttgagatgggatctcactatgttgcccaggctggtctcaaactcctggcctcaagggattgccctgcctcagcctcccaagtagctagtattacagtcgtgagccactgtgcctggctaggttttctaaataaaatatttaaaaaaaattagccgggcagtagtggcacgcgcctgtaatcccagctactcgggaggctaaggcaggagaattgcttgaacccaggaggcagaggctgcagtgagccaagattgcaccactgcactccagtctgtgtgacagagtgagaccctgtctcaaaataaaaaagtaaaagcaataaaaaaataaaaataaagcctactgatgcccatgctgcagcatcacccaactctctaacccttaacccctccagaccataagccctacctccccaagtctccttagctcagcctcccgtttcgtttctctctcagaagctgcacagatgtcatctgctgcgtcctcttcctgctcttcattctaggttacatcgtggtggggattgtgggtgagtttccagctgctcagagccagggcagtgggtgagggacaggaacccagggagggaccattcccataactgccccactaagtccctgccctccaatgactcatctgtgcctctgtctgcagcctggttgtatggagacccccggcaagtcctctaccccaggaactctactggggcctactgtggcatgggggagaacaagtgagtacaaaggcgagaagaggagtgcaggagcgaggcgaggtagggtgggcaggagacacccccccaactcaggctccagacctgtccgtgctcttccacagcctttccctgctgtccccaccccacctcagcctccctgaatctgacaactccaggccacgttaagaaccattgctggacagttagcttcttgagtccccccagaaatgggaggcagtggagagtcgtgttaagtgtatgagttttacagttcagagattggtgtttggatccccaactggaccaagttttggttgtgtggccttggacaagttactcaagctctctgagctttgatttccttatttgaaattcaaggggaattccagaagcaatgccaacagtcctcacatacagatgtccaataaataataaaacctcaaatatttatatagcatttactatgttccaggcaggcagtaaactttacacacacaagcgcattgaaatctcatgaggtaggcactactgttttatatggagtagaactaagaccgagaacaggtgacttgctcaagatcataaagatgatatgaagttgtggagctccaagttcatgctctgagctatttgtcagctgctgcaatggtgacttactctgagagatcttctaggcatctccctacctccccagctgagctagggccaggagctgggaggtgactggtatgggccacgctgggctgggcccactgtattcttgagaagccaccctagtggtccctcccctcccccaacacctgaccaggccctgatgcacatggtccctcccctcccacagagataagccgtatctcctgtacttcaacatcttcagctgcatcctgtccagcaacatcatctcagttgctgagaacggcctacagtgccccacaccccaggtcagagcctgggacctgcctctaccccagatctcacccagggtctcaggttccagccccttagtgttctctctgcacccaggtgtgtgtgtcctcctgcccggaggacccatggactgtgggaaaaaacgagttctcacagactgttggggaagtcttctatacaaaaaacaggaacttttgtctgccaggggtaccctggaatatggtgaatattgcccctaacctcatcactgtcgcccagaagggccagggtgggcacgagagggagggggagttgggtagatcatcaccaggttggctctcctggggagtgtgggacaggctgagccccatggtggtggtgaggggacctgcttcttcatcctgctctgtgtctgtgtgtctgtcctttcactcctgccacagacggtgatcacaagcctgcaacaggaactctgccccagtttcctcctcccctctgctccaggtgagaagcacagattccttcctcagacgtcatctagtccagtgttttcattgcttgaatgaagaaatcaggcccagagagagtgaagtcacatagcttgttggtggcaaaattggaattagcatcaggtcttcattttgctctttgttatgtggccttgcagtcagaccatcagtgttttggggacctactatgtgccaggtgctggggacagaggcagggataacaactgctccctgcttcagctacattctaggtgaagagattagagttgttcacaaagagactgtatgaaaatctcatgaaaacatacatgggtgaatctacacacacattttttttttttagacggagtcttcctctgttgcccaggctggagtgcagtggcgtgatctcggctcactgcaacccccgcctcccgggttcaagcgcttctctgcttcagcctcccgagtagctggaattacagcacatggtgcccgccaccacgcccggctaatttttatttttattttatttattaaatttatttattaaatttgtatttttagtagagacggggtttcactatcttggccaagctggtcttgaactcttaacttcgtgatccacccaccttggcctcccaaagtgctgggattacagacatgagccaccacgcccagcctgcacacatatcatttttatatatgcacagggaaaaggctagaaggatatttgttcaaatgttataagtgaacgtggctgggtggtaggatcacagttgaactttttttcttttacagtgtgctcttccttccagtagcaaatgtctttttttttttttaagagatgaagtcttgctatgttgcccaggctggtcttgaactcctcgattcaagcaatcttcccacctcagcctctcaaagtgctgggattacagacatgagccccgacacccagttgcaaatgtcatttttaatataaaacaatttttaggccaggcatggtggctcatgcttgtaatcctagcactttgggaggctgaggcaggcagatcacctgagatcaggagttcgagaccagcctggccaacatggcgaaaccctatctctactaaaaatacaaaacttagctgggcgtggtggcatgcacctcttatcccagctactcaggaggctgaggcaggagaattgcttgaacccgggtggcagaggttgcagtgagctttgcagtgagccaagatcgcgccactgtactctagccttgctgacagagcgagactccgtctcaaacaaaaattttaggccgggagcagtggctcacacctgtaatcccagcactttgggaggccgaggcgggcggatcacaaggtcaggagttcgagactagtctggccaacatggtgaaaccccgtctctactaaaaatacaaaaattagccaggtgtggtggtgggcacctaaaatcccagctactcgggaggctgaagcaggagaattgcttgagcccagaggcggagtttacggtgagccgagatggtgccactgcactccagcctgggcaacagtgagactccatctcaaaaaaaaaaaattagacaatttatagcataagatgagatatccagttaccaatttaagtacagtaaggagtatctcaagtgaatacttcaaagtcaagtagatctgaatataaattctagcactttccagccctatggtcttgacccaactatgcaacctctctgaaccttgtttcctcatctttagaatgtaaatgacagtgaggtgcagtggctcacgcctgtagtcccaactgctcaggaggctaaggcgggagggtcacttgagtcctggagttggaggttacagtgagctatgattgtgccactgcactccagcctgggcaatagagtgagaaaccctgcctctaaaaaataaataagctaggtgaggtgactcacacctgtaatcccaacactttggggggctgaggtgggaggattgcttgagcccaggagtttgaggccagcctgggcaacacagcaaaaccccatctgtacaaaaaatttaaaaattagccaagtgtggtggtgcacatctatagtcccagttgcttgggaggctaagtggggaggatcgcttgagcccagaagttcaatgttgcagtaagctatgatcatgcagctgcactctagcctgggtgacagagcaagaccttgactcaaaaataagtaaataaataaataaatagataaataaatgacaaagcaaggctgcctggcaaagttgttgcaaggatggcagtaagtggctctgtaggcacataacagttgccaaaggaggtggggataaggtcagaaggcttcctggaggaggtgagatggagctggatttgaacagggagtcatggatgggatttctggtggaaagagagccctgagagagaggcacagtaagagcaaaggtacagattagaagggaacatgggctggatttggacaggagagcctggaagcctggccagggagtgtggatgctgtctctggggcagagcctctggagatgtctgagtcacaaagggacccagaaccctggagtgatgaagtccaggcagtgccacggtctccctggcactccactcgggtggagggtggatggaagggtgacagggtgttctaagagttgaggccagcggagaggagggtccaaaccaaggcacgacagggaggggaggcaggggatagactgggctccacaggacagaagcccatttgtgaaatcaaaagcagcccactgagggatgcaaggcccatcacccttccctcccctaagggcactgtggactgggagggggccagagaccctccaggcagagctcctggcccccaacccagcagcccggctctcccttccagctctgggacgctgctttccatggaccaacattactccaccggcgctcccagggatcaccaatgacaccaccatacagcaggggatcaggtaggcacctccctcccccacatcctggccacaccccttccacccacagccccatctgactctgtctccccaacagcggtcttattgacagcctcaatgcccgagacatcagtgttaagatctttgaagattttgcccagtcctggtattggattcttgtgtgagtcaccagattcccctcctcttgtgtccttgccttcttcctccctgatcctctaccccctcgcccaatgtctgaaacacaggctttggacagaggaggaggagccagagctccgaatggattccaagaccaacaggatttataagggaaagaggcctaatctggggacattgggtggtgtgtggaaaggcagggagggcctctgtaaggggaaagatttgaggggctagggctgaacctcactgtcctcaccctgcctacagtgccctgggggtggctctggtcttgagcctactgtttatcttgcttctgcgcctggtggctgggcccctggtgctggtgctgatcctgggagtgctgggcgtgctggcatatggcatctactactgctgggaggagtaccgagtgctgcgggacaagggcgcctccatctcccagctgggtttcaccaccaacctcagtgcctaccagagcgtgcaggagacctggctggccgcccgtgagtgtcctgcccacccccaagccaccagctgcccaaggactgccctgggccatgcccggccccagccctggccctgacctaggtctgtctgccccatcctctgcagtgatcgtgttggcggtgcttgaagccatcctgctgctggtgctcatcttcctgcggcagcggattcgtattgccatcgccctcctgaaggaggccagcaagttagggcctgcctgggagggagatggggttgaggacagcgtggacccaggagtgctaggggacctagggggtgctagagaggtggcagggagcctcagaggagaagggaggaatatagcacagtggtgaacactgctgtggctttgcttccccatctgtaaaatgggggtaacaataattcctgccttctagggttgtcttgaggattcaatgagtgcctggaatatgacataggccttctagaggggttggtgggagtggtggtggctgagtggaacggcaggaatccgggccaggaggggcagcagcttgctcccgatcaggaactgccacacacacctgccaagggatcacgcttgggggtgatcttcccttactccacccgaagctgccccaggtggcttctctgtgaccctagtttcctctaagggtcctgtgagcctgatttattcagttctgtttatccagtgagcacctacagtatgcctagccctgcaccaggccctgaggacacagatatgaaagacaatgtcactaaccctgttggtcccaccctgggggagtggggcaggccccagtgagggcagcggggtcagcccccccctttttttttttgagacggagtctcgctctgtcgcccaggctggagtgcagtggtgcgatgtcagctcactgcaaactccgcctcctgggttcacgccattctcctgcctcagcctccggagtagctggcactacaggcgcccgccaccatgcccggctaattttttgtatttttagtagagatggggtttcaccgtgttagccagcatggtctcgatctcctgacctcgtgatccgcccgcctcagcctcccaaagtgctgggattacaggcgtgagccaccgcgcccggccggggtcagccccttgagaagatggacagctggggcggtgccggttaacagctttgtctccctgcagggctgtgggacagatgatgtctaccatgttctacccactggtcacctttgtcctcctcctcatctgcattgcctactgggccatgactgctctgtatcctctgcccacgcagccagccactcttggagtcctgggggttgatggaaaacaaagcaatacttgccttgtagagtgccttggtgtcactggaagaggtgcccctttctctgggcagacacaccagcactgtgcctgaacagagttgaaagggtgcacacaggctgaatttcagccctctctgtgcagcaaacgatctgcacaagcacctaggaacaggtccctaaggagcgagtgacctgtggagacctcgtgtgatcatgctttccttgactcccctctgggtacctggctacatcggggcaaccccagtatgtgctctgggcatccaacatcagctcccccggctgtgagaaagtgccaataaatacatcatgcaaccccacggtaagaggaagcaggggacatggaggcgggactagtaggggtgaggggctgtaggggccacattcctcattgtgcagagaagactgaggccacagagggcaagacacttgtgcaaggtcacacactcaacccccagcagagctagaagaaaccagttcccagaatacctggtactcctgttgagccatccatcatgtggggagggaaactgaggctgggagagacagccctggataccaggacttactccacccctccccaggacattgctctgacttgaggaccatcaaccacttcaccctctgagtctcagcctactcctgtttgtttgtttgtttgtttgtttgtttgttttgagacagggtcttgctctgttgcccaggctggagtgcagcagtgcaatctcagctcactgcaacctccatcccccaggctcaagcaatcttcccacctcagcctcctgagcagctggaactactagcgtatgacaccacgccaggctaattttaagctttttgtagaggcaaggtcttgctgtgttacccgggctggtcttgaactcctggggttgccccgatgtagtcaggtacccaagcaatcctctggcttaacctcccaaagtactgggattataggagtgagccaccacatgcagctccattcctctgtaaaatgaggataattataatacccatccctggggtggctgagaagatgaaatgactttgggcacataaagtgcttagtacaatgcctggcacctgataagagctcaacaacaggttgaattgtattatattgttaagtcttactcccttggaacacagagccctaggtagtagccaggtgggactccctgcgggggacccgagagagaagctgcttccaaaattcccctgtgaggttccccgggagtggcgctgggctgctgggaatttactcttctcaaacctgtcatatcttcacctcgtctgagctgggaacatgagctgtgctgcaggcattagccccacccctattaaaaaggggaggtttggcaggcgcggtggctcatgcctgtaatcccagcacttaggaggccgaggtgggcagatcacctgaggtcaggagtttgagaccagcctggccaacatgacaaaaacctgtctccactaaaagtacaaaaattagccaggcatggtagcaggtgcctgtaatcccagctactcaggaggctgaggcaggagaattgcttgaactcgggaggcggaggttgcagtgagctgagatcgcgccattgcactgcagcctgggcggcgagactccgtctcaaaaaaaaaaaaaaaaaggtttatttacatgtacagaggacccactatgtgccaggcactgggtatacaaagcccaaaatgatgtggttctttttctttttcttttttttttcttttttaatgaaaaaaaggctgttacacaggctggagtgcagtgatgcgatcatggctcactgaagccttgatctcccaggctcaagtgatcttctcacctcagtctcccaagtagctgggactacaaacaagtgccaccatgcccggctaatttttttttttaagagatggcgtttcactatgttgcccaggctggtctcaaacaaatgggctcaagcaatttgcctgcttcagcctccaaaagtgttgggattatacacatgagcaactgtgctgggtatgacgtgagtgttgttttcaacttgcttgtgatctagcagtaaagactgacagaaggccgcgcgcagtggctcacacctgtaatcccagcactttgggaggccgaggcaggtgaatcatgaggtccagagttcgagaccaacctggccaatatggtgacagagtgagactccatctcaaaaaaaaaaaaaagattttttgattagccaggcatggtggcacacacctgcagtcccagctacttgggaggttgaagcaggaggattgcttgaacacgggaggcagaggttgcagtgagctgagattgagccactgtactccagcctgggcaacagagcgagaccctgtgtcaaaaaaaaatttttttggttatatttgctagaaagggttgctttttaatttgtgactttttactttttattatgggaatttttaaacatatgcaaaagtagagatgatagcacagtgagttccctgtacccagattccacaaccctcaactttttgctattcttatttcatctatatcctcacctataattttttttttttttgagatggagttttgctcttgtctcccaggctggagtgcagtggcgcgatctcggcccactgcaacctctgcctcctgggttcaagcaattatcctgcctcagcctcctgaatagctgggataataggcgtctgccaccacgcccggctaattttttgtattttcagtagagatgggatttcaccatgttggccaagctagtcttgaactcctgacctcaggcgatccgcccacctcggcctcccaaagtgctgagattacaggcataagccactgcacccgcctcataaatttttttttctggagacttttaaggcaaattctggacatcatgccatttcacctgtacatgcattgagatggatctcaacagataagaactgtttaaaagcatagccactatatcattatcacatctcacaaaattaacaataattccttaatatcatcaaatacccagcctgttcaatttgccggaaagggttttggtagacgttgcagaggctgctctggaatgggaatgctgagtgagtgccttcccctctgattgagactgagggagctgattatgcttatgctataggcagaccaaactgagtttgagcctggagatggaactctccgacagaacttgattcccgcagtccagagaagctacttcccacctgtcaactctgggaggggcaggagctactgggaatgggacgcccaggctccatactgaggcccccgatgcctgagcctactctatccccgtctaccctcccaggcccaccttgtgaactcctcgtgcccagggctgatgtgcgtcttccagggctactcatccaaaggcctaatccaacgttctgtcttcaatctgcaaatctatggggtcctggggctcttctggacccttaactgggtactggccctgggccaatgcgtcctcgctggagcctttgcctccttctactgggccttccacaagccccaggacatccctaccttccccttaatctctgccttcatccgcacactccggtaaggatggggcaggggcctggtcattgtaggcacgggggccccaggggtcctggagctgtctctgactgcataacaccctctgcagttaccacactgggtcattggcatttggagccctcatcctgacccttgtgcagatagcccgggtcatcttggagtatattgaccacaagctcagaggtgagtctggagtcggagtaggagtcaggagctggggaaggccattagggaggggcagtgaccaaacatgagccttcctcgctcccaggagtgcagaaccctgtagcccgctgcatcatgtgctgtttcaagtgctgcctctggtgtctggaaaaatttatcaagttcctaaaccgcaatgcatacatcatggtgagctacactgcaagcaaccctttgttctggtgccctttggtctagacacccccatcctggtccaggcagctcgccttggtaactctgacctttccacctccctcagatcgccatctacgggaagaatttctgtgtctcagccaaaaatgcgttcatgctactcatgcgaaacattgtcaggttaggctgctccccccccgctttgtggctccctcctctgatctcccacccaaggctggcttcgtgggtgtgctgtgctcagtcgggccctagacttagtttagtgctctgctcttgccatcttgaaacgtgaacaattttcattttgcaccagtccccacaaattacgaagccaatttcactctcagcattgccaggcctctcaccctcaacctgccctaacttctggcacagggtggtcgtcctggacaaagtcacagacctgctgctgttctttgggaagctgctggtggtcggaggcgtgggtaagggaccagaagctgtggggacagagggtaggggtgctgggcagctgaagaggtggcctcagaggtgcagcactaacccccagaattattccacaggggtcctgtccttcttttttttctccggtcgcatcccggggctgggtaaagactttaagagcccccacctcaactattactggctgcccatcatggtgagtgactcccctctctgctgctccacccccaactccccagaggaacccaataaccccaacgggtcatgtcttccagacctccatcctgggggcctatgtcatcgccagcggcttcttcagcgttttcggcatgtgtgtggacacgctcttcctctgcttccgtgagtgacacccccagccacctgtccccaaccttaaagtactgagccgttcaagcattttttttttttttttggagatttggtgcttctagaaacaatgcctttgtgagctaaacgaaccagagggagcttcttgtgacatcctgaggccaggcgtttagggaagaaggaagagagtgagcccccaggccggtaggctctccaaagaaggagcattctgatggagaggtctctgctatcttccctaagaaatctcgggtagaagttagccattagaggccaggcatggtggctcacgcctgtcatgccagcactttgggggaccgaggtgggcagatcaccctgaggtcaggagttcgagaccagcctggcccacatggtgaaacccctctctactaaaaatacaaaaaattagctgggcgcggtggcgggcgcctgtaatcccagccacttgggaggctgaagcaggagaatcgcttgaactcgggaggcggaggttgcagcgagccgagattgcgctactgcacttcagcttgggcgacagcaagactccgtctcaaaacaaagaaaaaagattaaaaaaaaaaaagagccattagagagacttcccagcaggtggctgtagcggcaggggattttcttactctacagcatgcatccattcagggtttgccagtctcctcctaagcgactgacatgcattttttccgctaattcttatcatcgctctatgcaacataatattcccgaccccacttcacaggaggaaactgagattacataacctgcccgggggtaagggtggtggtgcagcttggattccaaatcccgcaggcagcttgcctcccagtccccgatttcctggccccagggtccgctctaaccggtctctgttgcggctcagtggaagacctggagcggaacaacggctccctggaccggccctactacatgtccaagagccttctaaagattctgggcaagaagaacgaggcgcccccggacaacaagaagaggaagaagtgacagctccggccctgatccaggactgcaccccacccccaccgtccagccatccaacctcacttcgccttacaggtctccattttgtggtaaaaaaaggttttaggccaggcgccgtggctcacgcctgtaatccaacactttgagaggctgaggcgggcggatcacctgagtcaggagttcgagaccagcctggccaacatggtgaaacctccgtctctattaaaaatacaaaaattagccgagagtggtggcatgcacctgtcatcccagctactcgggaggctgaggcaggagaatcgcttgaacccgggaggcagaggttgcagtgagccgagatcgcgccactgcactccaacctgggtgacagactctgtctccaaaacaaaacaaacaaacaaaaagattttattaaagatattttgttaactcagtaaatctgtgactcattctctccacgacgacaggcggcctttttttttccgcgcccggctctttaaaatcggccccgcccctgtgacgtgtcctggtgccgcggccaatcaaaaagcccaataaggatggtgccagtcccttcttcaccccagccagtccgcttcccgttcgggtcacgcgctccgggcctccaagagggcctccaagagggccaatcggaagggcaagcttcgagatgctgcgtgatcacgtgggaggagatgagctacttgaagaccaattagagtccgggaagcgcggcggggcctccagaccggggcgggcttaagggtgacatctgcgctttaaagggtccgggtcagctgactcccgactctgtggagtctagctgccagggtcgcggcagctgcggggagagatgactggggagcgacccagcacggcgctcccggacagacgctgggggccgcggattctgggcttctggggaggctgtagggtttgggtgtttgccgcgatcttcctgctgctgtctctggcagcctcctggtccaaggctgagaacgacttcggtctggtgagtcaccctttgcatagccccatccccgacccgcgcaggtgatcgacacctagtgtcccccggaacgcgggcggctgagccgactttccgcgacaggacccttttctttctcccagaccccgtttcctcctaccgctcccagcccctctccctctccgggtccccgtccttctcctcattcgagccccttcctcttttggggtccccttccctccctgaaggcgccttctcctttcgtagaccctcccctgctccgagcctccagcttcgctccaaactccccttcgtgttcctctttcttgttctgggaccccatcccctactcgggatccccattagatcctccctctcccatcggaacgtgggttcctaaaacccccaagacaagtttgtctttgttgacccttcctcctcccatgacaggtgcagccgctggtgaccatggagcaactgctgtgggtgagcgggagacagatcggctcagtggacaccttccgcatcccgctcatcacagccactccgcggggcactcttctcgcctttgctgaggcgaggaaaatgtcctcatccgatgagggggccaagttcatcgccctgcggaggtccatggaccagggtataaagatgtctgggtgaaagagccggtgctaggttggatgggtgggcagcccaatgagcccaagggccctgaggataggggaacttagagggttggttgcctgagtccctgaggggtagagggaacccgagaagggcaagtgtctaggacagtgatctggaaattgggatcaccaaggagttggacattcacttagcaaacatttattgggtactatatacctataccaggcactattttaggtttcatgaatatagccacgaacaaaacagatcaaaaatctctgccctcaggatttaaattgtactggaaggagacagacaagcataataaacaagtaaacttttttgtctgttgcaaggtgataaatgcaatggagaaaaataaaacaggacaagaggtatagatagtgcaagtgttggattgcaccctgggaccatcggaaggcctgaggtccctagcagaaggtgggaaattaacgggaagtggtagaaagggtacctgcagagtgctcactctgggtttcttcctccaatttttttcaggcagcacatggtctcctacagcgttcattgtcaatgatggggatgtccccgatgggctgaaccttggggcagtagtgagcgatgttgagacaggagtagtatttcttttctactccctttgtgctcacaaggccggctgccaggtggcctctaccatgttggtatggagcaaggatgatggtgtttcctggagcacaccccggaatctctccctggatattggcactgaagtgtttgcccctggaccgggctctggtattcaggtctctgtcctaggagataggtggagggggctgccttgtggagagtctgagggatacccccaaatggactcctttccaaggggaagattctctgaagtcagattttctggcttgggtgggattccttgaaagacagggcatcctggtaggaacacattatcaggagaagagggaactctgccattggcttcccatttggcattgtcaacaggactgcgttagtccatgcaataccctcatgcaaagtagaaaaaggcactgcctctttggacagacacaagcctgtgccagggtgcacagcttggcgagtgagcacaggttgggtttaagctctcatgcaccctgtggctgggcccctggtgcacatgtccagctgtacaccctgggagagcttcttaattcaaacagggtgtgtatttatgggatctgactggaaccctcagtgagcaagggctgaactcaaggggaccatacatgtgattgcatttgggaagtggtgggttctctgtccctgcctctgagcccctagagtctccttctgtgacacccagttccctttcccacagaaacagcgggagccacggaagggccgcctcatcgtgtgtggccatgggacgctggagcgggacggagtcttctgtctcctcagcgatgatcatggtgcctcctggcgctacggaagtggggtcagcggcatcccctacggtcagcccaagcaggaaaatgatttcaatcctgatgaatgccaggtcaggagtccatgagatgttccctacccatttgaccctccctgccctccagaacatcatttcacgcacagacccagggtctgactgctccactcagtgccacacacccttgctcccctcggggacagggcattttccctgttccctccctgaggtcctgtcctctcccctcagccctatgagctcccagatggctcagtcgtcatcaatgcccgaaaccagaacaactaccactgccactgccgaattgtcctccgcagctatgatgcctgtgatacactaaggccccgtgatgtgaccttcgaccctgagctcgtggaccctgtggtagctgcaggagctgtagtcaccagctccggcattgtcttcttctccaacccagcacatccagagttccgtgagtgcctcatgggtggggtcagcagggagagccctgtgtctagacaaggcctgggcagagaccctctctccctgactctcctgctctccccaggagtgaacctgaccctgcgatggagcttcagcaatggtacctcatggcggaaagagacagtccagctatggccaggccccagtggctattcatccctggcaaccctggagggcagcatggatggagaggagcaggccccccagctctacgtcctgtatgagaaaggccggaaccactacacagagagcatctccgtggccaaaatcagtgtctatgggacactctgagctgtgccactgccacaggggtattctgccttcaggactctgccttcaggaacacgggtctgtagagggtctgctggagacgcctgaaagacagttccatcttcctttagactccagccttggcaaaatcaccttccctttaccagggaaatcacttcctttaggactgaaagctaggcgtcctctcccacaaaaaagtcctgccctcatctgagaatactgtctttccatatggctaagtgtggccccaccaccctctctgccctcccgggacattgattggtcctgtcttgggcaggtctagtgagctgtagaattgaatcaatgtgaactcagggaactggggaaggctgagcctcctctttggtgttgcggtaagataaccgacagggctggtgaaagtccccagatggcaggatatttggtttcagagtaaggactaggtgcaccaccatgactgactatcaatcaaaatgtttgtaacttaaaatttttaatgaaggataatgaatatttgtagagtctctatggttctgtcaatgcacatcttcgtgtctgttttcctcatgtatccttgtgagcctgggtgagttctggggagagacctgatgtgcgtactgcctgtgaaaatctgactttggcaaatcaaatcctcttttccttttgacatgccctctttttttgttgttgctttttttgagacagggctcgctctgtcacccaggctggagtgcagttgcacaatcacggctcactgaagcctcaacctcctgggctcaagtgatcctcacgtctcagcctccggagtagttgggactacaggtcagtgacaccatgcctggttaatttttttaatttttattttcagtagagacaaggttgcgctatgttgcccaggctggtatggaactcctgtgcttaagcaatcctcatgcctcagcttcccaaagtgctgaggttacagctatgagccaccgcacccagcctacattccttcttatcaccgagaaacaggttgatcttcacaggtgtaatgagtatgaagggagtgccataagatattttttattttttatttatttattttttaatttaatttttttttttttgagatggagtcttgctctggcacccaggctagagtgcagtggtgcgatctcggctcactgcaacctctgcctcccaggttcaagcgattcttctgcctcagcttcccgaatagctgggattacaggtgcccaccaccacacccggctaatttttgtatttttagtagagacggagtttcaccatgttggccaggctggtctcaaactcctggcctcaggtgatccacccgcctcggcctcccaaagtgttgtgattacaagcatgagccatggtgccggcgggctgatttttttaatttttagtagagacaaagtctcactatattgcctaggttggtctcaaactgctgagctcaagcaatctgccggccatgttctctcaaagtgctgggattacaggcttgagcccctgcacccagcctgtaagatattttaaaatccacacttggccaagcgtggtggctcacacatataatcccagcactttgggaggccaaggtgggcggatcacaaggtcaggagttcgagaccagcctggccaatatggtgaaatcccatctctactaaaaatacaaaaactagccaggcgtgttggcttacacttatagtcccagctactcaggtggctgaggcaggagaatcacttgaaccaggaggcggagtttgcagtgagctgagatcacagcactgcacaccagcctcggcaacagagtgagactccgtctgaaaaaaaaaaaatccacgctgttttatatttctaacatggggtaggataccatcctccatgaaatagggtgcaagtgtgtgaaatgcagatgggaatcctgtcccagctagcctgacagagaagtgagcacttcctatggcaaattatgtaagaaaatattccccaggcagatgcttatgaaaagaatctgttcagcctgcaggtaagtgggagagcccttgctcaaaaaaaaaaagaaaaagaaatagtggaagacaaaaaggaaaggacactatgaatgtctgacccatgaactactacctgttagaaacagaagtgctgggaggcttgagagacagacactaccttcctggctaggtgtggtggctcagatctgtaatgctagcacttcgggagaccaaggcaggatgatcaaattaaagggcatcctgggcaacatggcaataccccatgtctaaaaaatttaaaaattagccaagcatggtaacgcacacctatagtcctagctacatgggaggatggcttgatctctttgaccccaggagttcgaggcagtagtgagctatgattgcaccactgcacaccaacctaggtgacagagtgagacctcatctccaaaaaaccaaaccaaaacaaaaaaccttcaagaaagaaaaaaagcttgaccttccctccctcactctttacagacccatggaatctgaagctctggtgttggagccaccaggcattaacaagccttctgggtgattcgtaatacgtttaagtttgaaaaccagggtcagaacttttaaacaagtgcaagtgtccagctaaaatgaattatatgtacgtcaaagttgcagaaatagttaaagaaccttttttttccagctttttttttttcttttaatacacagggaagggtcaggtgcagtggctcacgcctgtaatcccagcactttgggaggccgaggtgggcggatcacaaggtcaggggttctagaccagcctggccaacatggtaaaaccccatctctactaaaaatacaaatattagccatatgtggtggcacacgcctgtagtcccagctactcgggagcctgaggcaggagactcacttgaacctgggaggcagaggttgcagtgagccgagattatgccactgccctccagcctgggcgacagagcaagacttcatcttaaaaaaaaaaaaaaatacacaggaaagattgggacaagtggcaggagactgaaaggggaaagagcttgtttgtactaatgggacaaagtgggccgactctgggcacactgcttatgagttagctctactctgtgaggaaattttttttttttttttgagacagagtcttgctctgttgcccaggctggagtgcagtggcgcaatcttggctccccgcaacctctgcctcgctggttcaagcaattcccctgcctcagcctcctaagtagctgggattacaggcgcctgccaccacgctcggctaattttttggtatttttagtagagacccggtttcaccatgttggccagactggtctcgaactcctgacctcaggcaatacgcccgcctcggcctcccaaagtgccgggattacaggtgtgagccaccccacccggccaaggaaatatttaaaaaataaaataaaataagttatttaaaaattggggcaagttggctgggcacggtggctcacgcctgtaatcctagcactttgggaggctgaggaagggggatcacttgaggtcaggagttcaagaccagtctggccaacatggtgaaacactgtctctactaaaaattcaaaaaattagccaggcattgtggcaggcacctacaatcccagctactcaggagactaaggcaggagaatcgcttgaacctgggagacggagattgcagtgagttgaaatcatgccactgcactccagcctgggctatggagcgagactctccctcaaaaaaaaaaaaatcggggtaagtgttatcaatctaaaaaataataattaaaaagttcagaatctaggccaggcgctgtggctcacacctataatcccagcactttgggaggcagaggcaagcgaatcacctgaagtcaggagttcaagaccatcctggtcaacatgacgaaaccccgtctctaccaaaaatacaaaaattagctgggtgttgtgggtcgcgcctgtagtcccagctattcaggagactgaggaaggagaatcgcttgaacccgggagcgagaggttacagtgggccaagatcataccattgcattccagtctgggagacacagcgagactgtcttaaacaaacgaacaaaagctgagaatctagtgttgttgctttttacagatggagtcttgccatgttgcccaggttagattcagactgaagttcaagggatcctcctgcctcagcctcctagagtagatagagttgggactgcaggcacataccactgtaccaggcttagaatctagtttaaagagtttatccaccggctctccctccctctccctctgtctccctctccccacggtctccctctcatgcggagccgaagctggactgtactgctgccatctcggctcactgcaacctccctgcctgattctcctgcctcagcctgcccagtgcctgccattgcaggcacgcgccgccatgcctgactggttttggtggagacggggtttcgctgtgttggccgggcaggtctccagcccctaaccgcgagtgatcccgccaacctcagcctcccgaggtgccgggattgcagacggagtctcgttcactcagtgctcaatggtgcccaggctggagtgcagtggcgtgatctcggctcactacaacctacacctcccagccgcctgccttggcctcccaaagtgccgagattgcagcctctgcccggccgccaccccgtctgggaagtgaggagcgtctctgcctggccgcccatcgtctgggatgtgaggagcccctctgcctggctgcccagtctggaaagtgaggagcgtctccgcccggccgccatcccatctaagaagtgaggagcgcctcttcccagccgccatcacatctaggaagtgaggagcgtctctgcccggccgcccatcgtctgagatgtggggagcgcctctgccccgccgccccatctgggatgtgaggagtgcctctgcccggccgagaccccgtctgggaggtgaggagcgtctctgcccggccgccccgtctgagaagtgaggagaccctctgcctggcaaccaccccgtctgagaagtgaggagcctctccgccccgcagccaccccatctgggaagtgaggagcatctccgcccggcagccaccccgtccgggagggaggtggggggggtcaaccccccgcccggccagccgccccatctgggagggaggtggggggtcagcccccccgaccggccagccgtgccatccgggagggaggtgggggggtcagccccccacctggccagccgtgccgtccgggagggaggtgggggggtcagccccccgcccggccagccgccccgtccgggaggtgaggggtgcctctgcccggccacccctactgggaagtgaggagcccctcagcccggccagccaccccgtccgggagggagatgggggggtcagcccccccacccggccagccgcccggtccgggagggaggtgggggggtcagccccccgcctggccagccgccctgtccgggagggaggtgggggggtcagccctccgcccggccagcctccccgtctgggaggtgaggggcgcctctgcccggccgcccctactgggaagtgaggagcccctctgcccggccagccgccccgtccgggagggaggtgggggtgtcagccccccgcccggccagccgccccgtccgggagggaggtggggggggtcagcccccccgcccggccagccgccccgtccgggaggtgaggggcgcctctgcccggccgcccctactgggaagtgaggagcccctctgcccggccagccgccccgtccgggagggaggtgggggtgtcagccccccgcccggccagccgccccgtccgggagggaggtggggggggtcagcccccccgcccggccagccgccccgtccgggaggtgaggggcgcctctgcccggccgcccctactgggaagtgaggagcccctctgcgcggccaccaccccgtctgggaggtgtgcccaacagctcattgagaacgggccaggatgacaatggcggctttgtggaatagaaaggcaggaaaggtggggaaaagattgagaaatcggatggttgccgtgtctgtgtagaaagaagtagacatgggagacttttcattttgttctgcactaagaaaaattcctctgccttgggatcctgttgatctgtgaccttacccccaaccctgtgctctctgaaacatgtgctgtgtccactcagggttaaatggattaagggcggtgcaagatgtgctttgttaaacagatgcttgaaggcagggtgctcgttgggagtcatcaccaatccctaatctcaagtaatcagggacacaaacactgcggaaggccgcagggtcctctgcctaggaaaaccagagacctttgttcacttgtttatctgctgaccttccctccactattgtcccatgaccctgccaaatccccctctgtgagaaacacccaagaattatcaataaaaaaataaatttaaaaaaaaaaaaaaaaaaaaaaaaagagtttatccaactgcaaatgttgaggaagtggcccgtctagagctgaagattccaaagaatattagtctatgttccaaaagtgtagaagtttggaatcgcttatataaacagaaagtttatggaaacttagaatttcaacattgttctgtgttcacaattggtgggttcttggtctcattgatttaaagaatgaggccgcagaccctcacggggagtgttacagttcttaaatgcggcgcctctggagttgtttgttcctcccggggggttcgtgctctcgctagcgtcaggagtgaaactgcatacccctgcggtgagtgttacacctcataaaagtagtgtggacccaaagaacaaatagcaataaaatttattgcaaagacggaaataacaaaccttccactctatggaaaatgaccagagcgggatgtcactactcactcaggcagcctgcttttattcccttatctggccccacccacatcctgctgattggtccattttacagagagctgattggtccgttttacagagagctgattggtccattttgacagggtgctgattggttcgtttacaatccctgagctagacacaaaagttctccatgtcctcactagattagctagatacagtgtcgattggtgcatttacaaaccctgagctagacacaggatgctgattggtatatttacaaaccttgagctagatacagagtgccgattggtgtatttacaatcccttagctagacataaaggttctccaagtccccaccacactcaggagcccagctggcttcacccagtggatcccgcactggggccgcaggtggagctgcttgccagtcctgccccatgcgcctgcgctcttcagcccttgggaggttgatgggactgggggccgtggagcagggggtggcgctcgtcggggaggctctgcagcacaggagcccacggcggggttggggctcaggcatggcgggctgcaggtcctgagtcctgtcctgtggtgaggcagctaaggccccgtgagaaatcgagcacagcaagctgctggcccaggtgctaaacccctcactgccctgcccggggcttgtgggccagcctgccgctccaagagcggggcagccgagcccacgcccacccggaacttgcgctggcccacaagcgctgcgtgcagccccggttcccgcccgcgcctctccctccacacctccccgcaagccgagggagccggctccggcctcggccagcccagagaaggctcccacggtgcagtggcgggctgaagggctcctcaagcgcggccagaatgggcgccaaggccgaggaggcgccgagagccagcaagggctgcgagggctgtcagcacgctgtcaactctcagttctatggtaaggcttattgcatagttacaatgatctgattagtcaattttttttttcttttttggggggtgggggaaggtgttttttacattccacactgaagatgcaatagtcatggggtcttgggtgccatctggtctgagtcaggtacaggacaataaaggaggcagttaatctacaacaaagatcagtgattggaaaggaggtctcattacagaacaagagcaatgtggaggagagtctgtaagaagcagaattgcaaacatgctacatgattcagtctccaaggcttaacttccatcttggcataaacttagagtcctgaagttttgttttctttttacggtggactttgcacatcattgcctggtgagtgcccgctggatcagcagccaaattctagcatgaaaccctttccccaacatcccctttcaccttgcatggccctccttcccttcacacattgatccccactcccagcccctttgcttaggatcaaaccagctcaagctctctctgtcttctcagctgtcccttaaataagggaaagagacagtaacaatgaacactgacctgaacagcaaataccagggaccagggaccatggatacttttttgctaatgtaatccttccaaccaaaagtcatgacaaggagggaataggaaaaagtattttttttttttttttgagacagggtcttactctgtcacccaggctggagtgcagtagcatgatcacagctcactgcaaccttgaccacctgggttcaagcaatcttcccacctcagcctcctgagtagctgggactacaggcacttgccaccaagcccagctaatattttcatttttgtagaaacagggtcccactatgttgcccaggctggtcttaaactcctgggctcaagtgatccttgaccaccccacccgctcggcctcccaaagtgctagagttacaggcctgcccacccatagccatctaataatttttgcccaagaaaggattgggaaggaagatcaaagcaatggcttggacatctttccaacaacaacaacaacaacaacaaaaccacaacagactcaaattaccatagtagaagtataggtcttccttttcctaatactctgggatttttttttttttttgagacagagtcttgctctgttgcccaggcaggctggagtgcagtggcgtgatctcaactcactgcaacctccgtgtcccaggttcaagtgattctcctgcctcagcctcctgagtatttgggattataggtgcccaccaccacacctggctaattttttgtatttttagtagagatgggttttcaccatgttgaccaggctggtctctactaaaaatacaaaaattagctgggtgtggtggcatgcccctgtagtctcagctactcgggaggctgaggcagaagaatcgcttgaacctgggaggcagaggttgcagtaagccgagatcatgccactgcactccagcctggtgacacagtgagactctgtcccaaaaaaaaaaaaaaaagaggccgggcgcggtggctcatgtctgtaatcccagcattttgggaggccaaggcaggcgaatcacctgaggtcaggagttcaagaccagcctcaccaacatggagaaacccagtctctactaaaaatacaaaattaggctgggcacagtggctcacgccacccagcactttggggaggccaaggcgggcggatcacctgaggtcaggagttcaagaccagcctggccaacatggtgaaacccccgtctctactaaaaatacaaaaattagccaggcgtggtagtgcatgcctgtaatgccagctactgaggaggctgaggcaggagaatcgcttgaacccgagaggggaaggctgaagtgagccgagatcacgccactgcactccagcctcggcaacaagagcgagactctgtctcaaaaaaaaaaaaaaaaaaaaaaagctggccagaggcggtaattacatgcctgtaatcccagtcccagtactttggaaggccaagacgggcagatcatttgagcccaggagtttgagaccagcctgggcaacatggcaagacctcatctctacaaaaaatttaaaaattagctggggcagtggcccacacctgtagtttcagctacatgggaagctgaggtgagagggtcacttgagcccaggaggtagaggctgtagtgcaccaagaccgcaccactgccctcaaacctgggcgacagggcaagaaacttgtctcaaaaacaaacaaataagaaacccacagcacattaggtcaaatacttttataaaaaaattttttaggccgggcacggtggctcatgcctgtaatcccagcactttgggaggccaaggcgggcggatcacaaggtcaggagatccagacctcctggctaacacggtgaaacactgtctctactaaaaatacaaaatattagccgggcgtggtggcgggagcctgtagtcccagctacttgggaagctgaagcaggagaatggagtgaacctggaaggcagagcttgcagtgagctgagatggtgccactgcactccagcctgggaaacagagcaagactctgtctgaagaaaaaaaaaattagagtgaaaaaataaaaaggttgatgagtctgtgtttcacgaaaaactctccaaactcccaaactgttttaaactttttcctcctctactctctcactctctccccccagccacactcacacacacacttttttttttttttttttttgagacagagtctcgctctgtcacccaggctagagtgcagtggcatgatctcggctcactgcaacctccgactcccagattcaagtaattctcctgcctcagattctcaagagtagctgggattacaggtgttcaccaccacacccggctaatttttgtatttttagtagcgatggggtttctccatgttggccaggctggtctcaaactcctgacctcaggtgatccacctgcctccgcctcccaaagtgctgggattacagccgtgagccactgtgctcaacaacacacttcttttaaagacagggtctcactctgtcacccagcctggagtgcagtactgcaatcatagctcacttcagccttgacctcccaggctcaagcagtcctcccacctcagccccatgagtggttggaaccacaggtgtgtgccaccacacctgctaatttttgtattttttgaagacacgaggtctcgacatgttgcccaggctggtcttgaactcctgggctcaagcaatccaccaacctcggccttccaaagtgctgggactacaggtgtgagccatggtaactggcctgaatattaagtgctattagggaattaaatttgcttttctcaggtataatagtattgtgaatatgcagatgaacatccttattttttggagatgcatactcaaatacaaagggataaaatgtcataatctctttaatatactttgaaatgatcctaccaaatataagtacatacagatgctaatatcattgtttttgccaattttcttttttcttccttttagatacagggtcttggtctgtcgcacaggccggagagcagtgagtggaacaatcatggctctgtagcctcgaccttctgggctcaagtgatccttccatctcagcctcccaagtagctgggactacaggtgcttgggagtacacctaattttttaattttgtagagaagtggtctccgcccaggctggcctcaaactcctgcactccagcaatcctcctgccttgacctcccaaagtactgggattacagacattagccaccacgcccaaccaaaacttttaaaagtttttttttttgttttataacagttcctctgcctcttttagaggcaatcaacccagtgtggagcacaggtattccctgggtggcactaggagatgggacttgctccctgtttcaaggtggtaccagctaatgctgcaaggccctttgaagaaggctcccccttcccagtttattatctgccatcagtaaataactggggattatcagctgacacctttatcttcactacattctttagaatttaagacaggcaacagccagcctagaatgtgacccacttccacctgaggttcacctgactggaggcaataaagtttaacatttcaagagtcagcaggtactttaacccttaggataatttgtttctttatatagtctttggaaaataacacaagaattaaaaaaaaaaaaaaaaaaaacagccaggcttggtggctcaggaggcagaggctgcagtgagccaagatggctccagtgcactacagcctggacaacacagtgagaccctgtccaccccactcccccccaaaaaaagtcatgggaaagtagaatgctaatgaaaagaaagtactacaatcaacaaactaacagatgggcctgagatgctaaaaaccaggtacccctgtacgccattgggcagcagagctcatgatggctctgtggctgttctggctgcaggtaacaaatccatgtaacaaacaaagtaggctgggtgcagtggctcacgcctgtaatcccagcactttgggagggcgaggcaggtgaatcacaaggtcaggagttcaagaccaacctgaccaacacggtgaaaccttgtctctactaaaaatacaaaaattatccagacgtggtggcaccacctgtaatcccagctactcaggaggctgagtcaggagcatcgcttgaacctgggaggcgtaggttgcagtgagctgagatcatgccactgcactccagcctgggcaacagagcaagactcccatctcaaaaacaaaaacaaagcagctctggagttggagtatctcattccatccttcatgtttcaaaacttccttttcatatcacctctgatttctctgctccacattatggattatttctccctccaactcactaattcttcatttagttggtctgctgtttatcttgtttattgtgtatctttgttgttttttttggtttttatttttagagatggtgtcttgcaatattacccaggctggtctcgaactcctgggctcaggtgatcctcccaccttggcctcccaaagtgctgggattacaggcatgagtcaccatacccagcccccaagctatgtttttaagatactaagaaatatttcagacatgcaaaaataagaaatgagaggccaggcacattacatatgcttacatactaccagtatgtaaacatatattaatgttacatacaactaatatgtaaacattacgtaccactagttgttggttttgttttttttgagacagagtctcatgcttttgcccaggctggagtgcaggggttcaatcttggctcactgcaacctccacctcctgggttcaagcaattctcatgcctcagccatcagagtatctgggattacaggtgtgcaccaccacacttggctaatttttgtatttttagtagagacagggtttcgccatgttgaccaggttggtctcaaactcctggcctcaagtgatccacctgcttcggcctcccaaagcgctggaattacaggcatgagacactgcacccagccccaaaagtttttaaggttatttctgggctctagaatttcctcacaacccaaaagatgcaaatttcatccatgagttctgttggtgcaggtttgggtgtaccccacaaagcctgcggctgtgactctggccaatgggtagaaattttactcctcgaacactgacaaaagagctccaagcagctcctgggtttctgtagcatggctgaagcagagtggaaatggggtttcaccatgttggccaggctggtccccaacccctgacctcaggtgtagaagatgaggtcagaaagttgacagagctagactgggaggaccttgttgggtggcccttgtaagatggagacttttactctgagtgaaatggcagctgttacaggatcttcagaagaggggagacatgacctgactcctgatttggaaggaaccttctggctgctgtgtggagagagcctgtaacgggcaaaagtggaagccaggagaccaggtaggagacagttgcagttgtctaggtgagagccaatggtggctcccaccaggatggagcagcagtaaaggtgtgagacacagatcctcgtgtcatttctaagatacagacagtatgatttgctgacaaattagatgtagcatgtgagaacaggagagcagtcaggcagattccaagggtctagcctaagcaactggcaggtagaggtgtcacctggagggccagcacactggccagtgggtaaggattccaaggattcttgtctcccatttctgtggggagacaggctgaggccaagccttaggaggctcactgcctacagtagctgaagtagcaggctagccgctattagagtaactgcaagctggggagttcagcctgggaggatgggaaggaggactgtttattactgaagttgctccactcctggtatggaaatggggcctaaagaaatgaggaaaataggccggcggtggctcacgcctgtaatcccagcactttgggaggccaaggcgggtggatcacgaggtcaggagatcgagaccatcctggctaacacggtgaaaccccgtctctactaaatatacaaaaaattagccgggtgtagtggtggacgcctgtattcccagctaatcgggaggctgaggcaggagaatggcgtgaacccggaaggcggagcttgcagtgagccgagatcgcgccactgcactccagcctgggcgacagagcgagactccgtctcaaaaaaaaaaaaaaagaaatgaggaaaatagcattttggggttgaggtctttcagcatcaccactgtgtgagaaaagaagttcacgtgaccatcttaccatggctgtagctcagtcttataccccaaacctgggattagcacccaccacacaggggaggacttgaaccatacaaagggcaggggaatgcagaagagacccttggggacaagaaatgaaaccaacaaagctgagtatggtggcatatgcctgttgccccagctactgaggaagctgaggcgggaggatcacttcagcccaggagttcaagtcagacctgggcaacagagcatgactctacctcttcatttatttatttagagataaggctcactctgttgcccagattggagtgcagtggcacaatcatggctcactgcagcctcaacttccagggctcaagcaattctcccatctcagcctcccaagtagctgaaccacggcatgccatcacaaccggctaatttttaaaattttttgtaggaactggatttcaccgtgttgcccaggcagactggtctcaaactcctgggttcaagagatctgcccaccatggcctcccacagtgctggggttgcaggtgtgagccaccgcactatgcttcttttttgttagagacgggataggccgggcttggtggctcaagcttgtaatctcagcatttggggaggccaaagcaggtagatcatttgatttcaggagttagacaccagtcaggcaatatagtgaaaccttcactgtataaaaaatttaaaaattagctgggcatggctgggcgcggtggctcacctgtaatcccagcactttgggaggccgaggcaggtagatcatgaggtcaggagatcgagaccatcctggctaacacggtgaaacctcgtctctacctaaaatacaaaaaaattagccaggcgtggtggctggcacctgtagttcctgctactcgggaggctgaggcaggagaatggcgtgaacctgagaggcagagcttgcagtgagccaagatcgcgccactgcactccagcctgggtgacagagcaagactccgtctcaaaaaaaaaaaaaaaaggtcaggtacggtagctcacgcctgtaatcccagcactttgggaggccaaggcaggtggatcacgaggtcaggagatcgaaaccatcctggctaacacggtgaaaccccatctttactaaaaatacaaaaaattagctggccgtggtggtgggtgcctgtagtcccagctagtcgggaggctgaggcaggagaatggtgtgaacccaggaggtggagcttgcagtgagccgagattgcaccactgcactccaacttgggcgacaaagcaagattctctttcaaaaagaaaaaaaaattagctgggcatgatggagcacctgtagttccagctacttcagaggctgaggtgggaggatcacttgagcccaggaggtcaaggctgtagtgagctgtaatcttgccactgtactcgagcctgggcaacagtgacaccctgtctcaaaaaaaagagagggtaggcccggtgcagtggctcacacctgtaatcccaacactttgggaggtgggtgaatcacctggagtcaggagtttgagaccagcctggccaacatggtgaaaccctatctctactactgaagaaaaaaaaaaaaagagggtgggtaggaactctgttatctatttacaaacaaggaaattgttatgggaatcactgaggaacttagccaaagttaacctagcagtaagtgttcagtctggctcctgaatctttttgaaacagtctcactctgtcacccaggctggagtgcagtggtgccatcttggttcactgcaacctccacctctcaggttcaagcgattctcatgcctcagcctcccaagtagctgggcttacaggcgcatgccaccatgctcggttaactgtatgtatgtatgtatgtattttgagatgtagtttcattcttgttgcccaggctagagcataatggcatgatctcagctcactgcaacctccgcctgccaggttcaagtgattctcctgcgtcagcctcccgagtcgctgggattacaggcgtgtgccaccacacctggctaatttatttttgtatttttagtagagacagggttttgccatgttggccaggctggtctcgaactcctgaccttaggtgatccacctgcctcggcctcccaaagtgctgggattacaggcgtgagccaccatgcctggccctaattgagatggagtctcactctgtcgcgcaggctggagtgcagtggcgggatcttgactcactgcaagctccacctcccgggttcacgccattctcctgcctcagcctcccgaggagctgggactacaggcgcccgccaccacgcccggctgatttttgtatttttagtagagacggggtttcaccgtgttagacaggatggtcttgatctcctgacctcgtgatctgcccgcctcggcctcctaaagtgctgggattacaggcgtgagcctggcccttttttatattttttttagtagagatggggtttcaccatgttggccaggctggtccctaacccctgacctcaggtgatctgtccgcctcagctgcgattacgggcatgagccaccatgccaggccctgaagttttttatgtccacaaatgtgtatggaagggtggactacaaatgaactacaggaaaatacatgaacaacaacaaaagttgcaggccaggtgtggtggctctggcctagaatcacagcactttcactttcagaggctgaggctggcggatcacctaagttcgggagaccagcccgaccaacatggagaaaccccatctctaataaaaatacaaaattagccgggcgtggtggcatataatcccagctacttggcaggctaaggcaggagaatcgcttgaacccaggaggcagaggttgtggtgagccaagatagtgccactgcactccagcctggggaacaagagcaaaactatgtctcaaaaaacaaaaaaggctgggcgcgatggctcacgcctgtaatccctgcactttgggaggccaaggcgggcggatcacgaggtcaggagatccaagaccatcctggctaacacaatgaaacccgtctctactaaaaatacaaaaaaattagccgggcacctgtagtcccagctactccggaggctgaggcaggagaatggcttgaacctgggaggcagagcttgcagtgagccgagatcgcgccactacatgctgcctgggcgacagagcgagactccatctcaaagataaatgaaataagtaaatgtcaggcgtggtggctcacgcctgtaatcccagcatttcaggaggccgaggcgggcggacggtgaggctaggagttggagaccaccctggccaatgtggtgaaaccccgtctctagtaaaaatacaaaaattagctgggcatagtggtgcgcgcctgtggtcccagctactcgggaggctgagggaggagaaatcgcttgaacctgggaggtggaggttgcagtgagctatcgcgccactgcactccagcctggcgacagagcaagactctgtcccccccgccccccagaaaagcagaaagttgcagtagaacacatgaagatttattctttttgaaaaatgaaaaatgggccagcatggtggctgtttgtaatgccagcactttgggagtccaaggtgggcaaatcacaaggtcgggagttcgagaccagcctggccaacatggtgaaacccccatctctactagaaatacaaaaaattagcggggcatggtggcgggcacctgtagtcccagtgatttgggaggcccaggcagaataatggggtgaacctgggaggcagagattgcagtatgagtcgagatcacgccactgcactctagcctgggcgacagtgcaagactccatccccccaaaaaagaaaaatgttgtctcgtgtctggtgaatcattccatttttacaaagttcaaaagatacgcaaaattaaaatgatattgtttagcaatgcactcagtaaaactattaagaaaagccagaggatgatatacccagttaattctccaagtaggaagaagaaaaagagaaattgaatcagacaggtttgtttcaaagttattggtaatgttctggccaggcacatcatttgaggtcaggagttcgaaaccaccctggccaatatggtgaaacccctatctcttcaaaaaatacaaaaataaggtgtgcagctgtagccccagctactgggaacgctgaggcacgaaaatcacttgaacccggggagaggctgcagtgaacccaaactgcgccactatattccagcccaggtgacaaggtgcaactgtctcaaaaaaaaaaagatggctaattgggtagccgtggacactttacaatcattaaaaaaaactcaaattcggccaggcacagtggctcacacctgtaatcccaacactttgggaggctgaggcaggcggatggcttgaggtgggtggatcacctgaggtcaggagttcgagaccagcctggccaacatggtgaaaccttgtctctactaaaagtacaaaaaatagctaggggaggtgccaggcgcctgtaatcccagctactcaggaggctgtgaggcaggagaatcacttgaactcaagatgcagaggttgcagtgaggcgagattttgccattgcactccagcatgggcaacaagggcgaaactccacctcctcccctgccagaaaaaccatctcaaatgattgtcaaaagtctagtgtattatacataatactatgtcacccaaccaagaatctctaatattaggcttaagagttaagcctaactcagcattaactagctcacggggcttcatctttctttttttttaagacggagcctgtcgccaggctggaagtgcagtggcacgatctcggctcactgcaaccttggactccctggttcaaagccattctcctgcctcagcctcccgagtagttgggattacaggtatgtatcaccacacccagctaatttttgtcctttgttttagtagagacagggtttcaccatgttggccaggataatctcaatctcctgaccttgtgatccacccacctcggcctcccaaagtgctgggattataggcatgagcaacttgcgcccagcccccttaatctttttgtaccattgttctgagaccaaaccacgtcttctttactttaaaatgctttattggaattattttgataaaagcaaatacttgtatataagacaaatataggaaatagaagctatctacttgaagtgccccctaattttcaggcatttttcccccaataaggtgacagctgctcacacaggataatacaggaaagttgtaagttcttaggatatgcccagcaccaggcggaagatattgtgtcagcaaattcctgaaaaataataaaaagaacattagaaccatatgagatgcaccaataaaaaaacgatttcatatcctttgcagcaacatggatgcaaccacaggccatgatcctcagtgaatcaatacagaacagaaaaccagataccatatgttcttacttgtaagtgggagctaaatgttgagtatacatggacataaagatggcaacagacactggggagaggaaatggggcaaaggtttaataactattgggtactatgcccactacctgggtgatggggataatcctaccccaaacctcagcatcatacaatgaacccaagtaacaaaactgcacatataccccctaaatctacaataaaagctgaggctgggcatggcagctcacgcctgtcaattccaacactttgggaggccaaggcagaagtgttcggaggccaaggcaagacaatcacttgagcccaggagtttcagaccagcttgagcaccatagtgggaccccattatctacagctttttttttttgagatggagtcttgctctgttgcccagggtgaagtgcaatggcgcagtgcaatggcgccatatcagctcactgcaacctccacctcccaggttcaagcgattcttctgcctcagcctcccaagtagctggaattacaggcgcccgccacccatgcccagctaatttttgtatttttagtagacagggtttcacggtgttggtcaggctggtcttcaactcctgacctcaggtgatccacccaccttggcctcccaaagagctgagattacaggcatgagccaccacacccatcctcaaatttaaaaaaaaaaaaattagccggggatagtggtgcatgcctgtaagtcattagctactccaagggtgaggtgagaggtgagcttccacccaggaggttgaggctgcagtgagctgtgactgcaccactgcactccagcctgggtgacagagcaagactgtctcaaaaaatagaataaaattgtcagatgctatggctcacacctgtaatcccagcactttgggaggctagggcgggcaaatcacctgagatcaggagttcaagaccaacatggtgaaaactcccatctctactaaaaatacaaaattagctgggcatggtggcgcatgcctgtaatcccaagtactcgggaggctgaggttacaatgagctgagaatgtgccactgcactccagcctgggcgacaaagtgaaactccatctcaaacaaaaaataaataaaaatacatgttgcgggctgggctcggtggctaatacctgtaatctgagcactttgggaggtcaaggtgggcagatctcttggtcaggagttcaagaccagcccggccaacatggtgaaaccctctactaaaaatacaaaaattagccgggactggtggcgcatgcctgtaatcccagctacttgggaggctgaggcagaattgcttgaacctgggaggcagaggctgcagtaagccaagagtgtaccactgcactccagcctggatgacagagcaagacagtctcaaaaaacacacaaaacatgttggggtggggcacagtggctcactgaggcaggagttgaagaccagcctgtgcacaaagtgagaccctgtaatacagtttagatctgtctccccaccaaatctcatattgaattgtaatggatcactggggtggattcctcatgaatggcttaagcaccatcctccttgatgctgtgctcatgacagtcagttctctagagatcaatttattaaaaatgtgtggcacctccctgcctttgctgctgctctggccatgctacatccctgcttccctctgtaccttatgcaatatagtttcctgaggcccccaccagaggctgagcagatgccaacaccatgcttcctgtacatcctgcagaaccatagccaattaaacctcatcatgtaagtaactggccataaaaacatgaattacaggagattgccggcaggatgaaggtggatcaggtgggttcaaagatcctcagagaaaagctcagagactcttgtccaaccagatcatcattaccactcccactgagagccaaaacaaaagatactcaccatagcaaggaaggagaacaggcatggctctccacctctcccagcctgaaggtcaagttgcaggaatcactgtctaagcatgacagccatacaaagcttctctccatgagggggagattccaaaccttagaccttcactcagattagtgcagaatctctgtgaaggtgcattgtccctggctgggcttccagagttcattctaacaaggtgaaaacaagacaatttgaaaataaacagaattatggccctcccattggcccttctggagacccaagtatccagttccctaaatgagtcagaacttagttttgacatcatgaccagcatcggagactctagtctgtgaaatcatcattcccaattagggagatctggatcaagggaagctcttctggaaagagatctagtacactcaaagaaaacacaacagtcccagtatatattgatctaacaaatgagtccaggagtggacgttagaaagggaggagtagaaagtaatttaaaacagcagagaacagctccactgggaggccccagtgtactcctattttgcagtagaaatgaggggaggagtcaggttacccagcctttaacaaaaatacggggatttattaaaacgtaaaaatacaggccgggcaaagtggctcacgcctgtaatcccggcactttgggaggccgaagggcgtggatcaactgaggtcaggagtttgagaccagcctgaccaacatgagtgagactcatgtccccccgccccctaaaaaagtaaaaatagaatagtcacaaggaaaatgatgtaaactaaaaagagtaagactgtccccccgccccccaaaaaagtaaaaatagtcacaaggaaaatgatgtaaaccaaaaagtaatctctagaaagtcaccaacaccagacgcagcaactcacccctgtaattccagcactttgggagactgaggcaggaggactgcttgagcccaggagtagagaccagcctggacaacatggcaaaagcccgcttctgtaaaaaaactaaaaattagccaggcgtggtggtagcacgtgcctgcagtcccaggaagctgaggtggaaagaccacttgagccctgacggtggatgttgcagggagatcctggcattgcgccctgtctcaaaaacaaaatagcaaaaacaaacaaatggaagtcaccacctgtggtacatggattatagctcaaaaaagaaaaagtggccgggcacagcggctcacgaggtcaggagatggagaccatcctggccaacatggtgaaaccccttctactaaaaacagaaaaattagccgagtgtggtggcgcgggcctgtagtcccagctaatcggcaggctgaggcaggacaatcgattgaacccgggaggcagaggttgcagggagatcgtaccattgccagcccgggcaacaagatcaagactccatctcaaaaaaaaaaaaaaaaaggaaaaaattggctaaggtgggagaatcggttaaacccgggagttgaaggccgcactgaattgtgttcttgccactgcattccagccagggtgacagggaggctgtcttaaaaaaaaaaaaaaaaaaaaggccgggcgcggtggctcacgcctgtaatcccagcactttgggaggccgagaggggcggatcacgaggtcagcagatcgagaccatcctggctaacacagtgaaaccccttatctattaaaaaatacaaaaaattagccaggcttggtggcatgcgcctgtaatcccagctaatcgggaggctgaggcaggagaatcgcttgatcccagaaggcgcaggttgcagtgagatcgtgccaccgcacttcagcctgggtgacaaggcgagactgtctcaaaaaaaaaaaaaaaaaaagggcagggaggcgcataatgcccatgaacgaaagcttgcttgggaacaaagctttccgaagaggcattcaaaaggctctcgcacctaatactcacctttactcaaggataacacggcgatgaacgtcttacaactcctaacggggaaatgaaacagaacaaaagattaggaatcttggccatgaactcgttgagcctgagaaatgctggaccgagggggcggtcagagcgctgcggtgatggcatcagcgacacactcagagttacctggggtcatcatcactcccttcctatccccgggcgaccgccacccccattttgcaatcactcgcccaaccccactcacagttgttttgagtcagcaggggctgtggggccgctagccgagttccccctgccacgagctaggtcagttccaagcaaagacaccagaaactccagtgtgcaacggtagttcacccaactgcactggggaccgccctctcctaccccagccaggccgcgacgtggccgcccgccggctgctgcgcaaaggcagcgcaagccgttgggatcccctgctccccctcactcaacagtcgggccattacaactctcatactgccaacccacgagcccacttcgcaaaaagaactaaaatggcgaggccggggccatttatggcggcgccgggttgggggcctgacgggtatagttgttttcttatctgcctggctagacgcgcggcattttccccattgtttgtccacacagaaataaaacaaagtgaaagaaagaccaggaaagtatgtttcacactcctctgggcaaatattcggagatgctttctgaattttgaaaaacaaaaaacagggatctgtctggccaggcggaagaaagtccccggcgccggccggccagcgccagccgggtgctgctcctaagccgtttcccagcagcccatggtccgttaatgaccctgggactcttcccgcgcgcgcgcgggcgcgcgcagctgcgccagtttagcgtccagctaccctgacacttcgcactccgttcccccagcgaaatctgaatttgcctcccagttcgatcccgcagactgtcaggcaccctaaccttcaattaaacaaaacaaaacaaaaaccaaaaacccaaaaggcaggtcggacgtaataggtcacgcctgtaatctcaacactttggacaggcccaggcagaggatcatttgaggcccggagttcgggaccagcctgggcaaatagtgacacccaacccccgtctctatttatttaaaaattaggccgggcgcggtggctcacgcctgtaatcccagcactttgagaggccgaggcaggtggatcacgaggtcaggagatcgagaccatcctggctaacacggtgaaaccccgtctctactaaaaaaaaattagcagagtgtggtggcggcgcctgtagtcccagctactcgggaggctgaggcaggaaaatggcgtgaacccaggacgccgagcttgcagtgagccgagattgcgccactgcactccagcctgggcgacagggcgagactctgtctcaaaaaaaaaaaaattattgaaactcataagtcatttcaaatcctttctggaccctttcctatcgcccccatttataaacgcgtatgatgtttggtgatgtgtgttgtgtgtgttggtatctttttcttttttgagacggagtctgactctgttgcccaggctggagagcagtggcgggatctcggctcactgcaacctccgcttcctcggttcaagcgattttcctgcctcagcctccgaagtagcaaggattacaggtgcacacaaccatgcctggctaatttttatatttttagtagagtcagggtttcaccatgtaagccaggctggtctcgaactcctgacttcaggtgatttgcctgcctaggcctccacaaagtgccaggattataggtgtgagccaccgagcctggcctcttcttttttttttttttttctttttctttttttttttttttgagatagggtcttgctctgttacccagattggagtgcagtggcatgatctcggcttactacaacctctgcctcccgggttcaagtgattctcttgcctcagcctcctgagtagctgagattacaggcatctgccaccacacccagttaattttatatatttttagtagagacaggggttttcaccatgttggcccaggctggttttgaactggtgaacctcagtgatcctcccacctcggcctcccaaagtgctgggattacaggcgtgagccaccgtggccagcccagttcagtggttttctccacattggctgcaaattacaaacacctgggcagctttaaatgtctacactgccctctttgagattctgaattggcctgagagaggcctggcatctgtatttttttagcatcccttaatcgttttattgttccattagggtggagagccatggctcaaagctaaagtatttgttccctctactgcctggcaagtatataaaaaaaagattagctatgggtggtggcatacacgtgtagtcccagctaatcaggaggctaaggatcaattgagcccaggaggtcgaggctgccatgaaccgtgatcataccactgcactctagcctgggcaacagagtgagaccctgccttaaaaaaatatatatatatatacagaaagccctaattcctgctgttttggcagttaagctgcctttactaagtgctatggtcagaggctttagttcctctttttttttttttttttttttttgagacagagtttcgctcttgttgcccaggctggagtgcaatggcgcgatctcggctcacagcaacctccgcctcccaggttcaagccattctcctgcctcagcctccagggtagctgggattacaggcatgcgccaccacacccggctaattttgtatttttagtagagatggggtttctccatgttggtcaggctggtctcgaactccagacctcaggtgatccgcccgcctcggcctcccaaagtgctgggattataggtgtgagccaccgcgcctggcctagttcatctctttcattaataaaacaggcctttaagaattggcccaagggccgggcatagtggctcacgcctataatcccagcactttgggaggccaaggcaggcagatcacctgaggtcaggagttcgagaccagcctgcccaacatggcggaaacctcgtctgtactaaaaatacaaaaaattagctgagcatagtggccggtgcctgtaatcccagctacttgggaggctgaggcaggagaatcgtttgaacctgggaggtagaggttgcagtgagccgagattgctccactgtactccagcctgggcaacaaaagtgaaactctgtctcaaaaaaaaaaaaaaaaaaaaaaaacttggccccaaaaccaaagaaacttactatattccttttcttttatacactttcaaggaggatttccagtattatgtaatccttaaaacgttttaaggatttaaaacattttaaaaccctagagggtaaggatttacacaaaggtgcaacacaggactttaaccgttttatttatgtttttttgagatgaagtattgctctgtcacccagggtggagtacagtggcgcaatctcaactcactacaacctccgcctccagggttcaagtgattctccttcctcagccttccatgtagctgggattatagacatgccccaccgtgcccacctagtagagacagggtttcaccatgttgaccaggctggtctggaactcctgaccttaggtgatccaaccgtcccacctcggtctcccaaagtgctgggattacaggcgtgagcccccacgcccggccagctaattctattgttttttgtagagatgggttttcgctatgttggccaggctggttttgaactccggacctcaagtgatccgcccacctcaccctccctaaattctgggattataggcatgagccatcgcacctggcccattttatttgatttttaaattctttttgtaaattgacaaactttagttgcatatattggtacaaagtagttattaacacaatatggagtaattaaatcaagctaattaacatatcacctcaaatatttttgtgacaagaacatttgaaattttgaaatatacaatacactattaactattttcaccatgccatgcaatatataccctccacccaccacccccccaaaaaaaaacacaaaaactggcagggcacagtggctcacgcctataatcccagcactttgggaggactagacaaggggatcgcttgagctgaagagttcgagaccaacctgggcaacacagcaagacttcgtctctacaaaatacaaaaaattagctgagcatgatggcacatacctgtagacccagtactcaggaggctaaggtgggaggattgcttgaacccaggagtttgagactacagtgagctctactgtgctccagcctgggtgacagagcaatatcccgtttcaaaaaaaaaaaaaatacaatttatttctcctgactaaggctttgtttcccttgcacgtctccccattcccccatcccacagcccttggtgaccaccacttctctgcttctgagttctactgtttagattccacatataaatgaatatgagccgaggtcaggagattgagaccatcctggctaacacggtaaaacgctgtctctaccaaaaatacaaaaaattagccaggcgtggtggcaggcgcctgtagtcccagttactcaggaggctgaggcaggagaatcgcttgaacccgggaggcggaagttaccgtgagctgagattgcgccactgcactccagcctgggcgacaagagtgagagtgagactccgtctcaaaaaaaaaaaaaaaaaaagtcagcatttttttgtggactccgctcactaagtagaagagggagagaaaaccaccataatcccatctcagcaccacccctcccctccccgccccagtgaacccacctcaaccacccctccaataccgttttgcagctgccatccgacttttccctgaaacaagccccactctaatcaagacgggcacctgcaatttctcttaaggcccacaattaagcccaaacaaaaatatgtgtagctctaactcctacacgtataactcttcagcagtactgttcttttcagactataaagatagatggtattcagacactatccctccgcaaatatccattatcttcacatattaacagacaagaaaaagtttaacattttatttttcatatttaaataaacaaattataaaaacatacattcccagcctttgtagtgttttcgccaagcaaaaaaaaaaaaaaaaaaaaaaaaaaacaaactcgtacagaaggtggcagtgttgattcatttaaagggaacgaaacacccttacagtatcaacattaaatgcaaagaattctaatgaacatatcggttgtactacaaaaataatgaagccagctaattaccatcaggttacaacttaactttacaaagaagtgaagcagcaaagagctgaagcagaaatgacataggaaaacagcagcaaagtccttgagtcccaacagtccacctcaaagacaaacatactaaagaacaaaggcccctaatccacctcctcaatggtagggcctgacccagaccctcccttgggaccctgagccccgaagcccccaggcccgggaccaccggcaccctggtacagtccgctgatgatggggttacacacctgctccagctccttcctcttgtgctcaaactcgtccttctcggccaaggtgttggcgtccagccacgagatgacctcttgacacttgtccagaaccttcttcttgtccgcctcgctgatcttgcccttgagcccctcatcctccacggcgctcttcatgttgaaggcgtaggactccagggcgttcttggctgacaccctctcgcgctgcacctcgtcctccgctttgtacttctccgcctcctgcaccatgcgctcgatctcctccttgctcaggcggcccttgtcgttggtgatggtgatcttgctggccttgccggtgctcttgtccgtggccgtgacgttcaggatgccgttggcatcgatgtcgaaggtcacctcgatctggggcacgcccctgggggccggagggatgccgctcagctcgaagcgccccaacagattgttgtctttcgtcatggccctctcgccctcgtacacctggatcagcaccccgggttggttgtcggagtaggtggtgaagatctgcgtctgcttggtggggatggtggagttgcgcttgatcagggcagtcatcacgcctccggccgtctccagccccagcgacaggggagccacgtccagcagcagcaggtcctgcacgttctcggacttgtcccccatcaggatggccgcctgcaccgccgccccgtaggccacagcctcgtcggggttgatgctcttgttcaggtcgcgcccgttgaagaagtcctgcagcagcttctgcaccttggggatgcgggtggagcccccgaccaggaccaggtcgtgaatctgggccttgtccagcttggcgtcgcgcagagccttctccacgggctccagggtgcttcggaacaggtcggagcacagctcctcgaacctcgccctggtgatggacgtgtagaagtcgatgccctcaaacagggagtcgatctccaggctggcctgggtgctggacgacagggtcctcttggccctctcgcaggcggtgcgcagccgcctcacggctcgcttgttctggctgatgtccttcttgtgttttctcttgaactcctccacgaagtggttcaccagcctgttgtcaaagtcctccccacccaggtgggtgtccccggccgtggccttcacctcgaagatgccgtcgtcgatcgtcaggatggacacgtcgaaggtgcccccgcccaggtcaaagatgagcacgttgcgctcccccttgcccgttctgtccaggccgtaggcgatggcggcggccgtgggctcgttgatgatccgcagcacgttgagccccgcgatcacacccgcatccttggtggcctggcgctgcgagtcgttgaagtaggccggcacggtgatcaccgcgttggtcaccgggtagcccaggtacgcctcggcgatctccttcatcttggtcagcaccatggacgagatctcctcggggtagaatgccttggtctcccccttgtagctcacctgcaccttgggcttgtctccgtcgttgatcacctggaaaggccagtgcttcatgtccgactgcaccaccgggtcgccgaacttgcggccgatcagccgcttcgcgtcaaacacggtgttctgcgggttcagcgccacctggttcttggccgcatccccgatgagccgctcggtgtccgtgaaggccacgtagctgggggtggtgcggttgccctggtcgttggcgatgatctccaccttgccgtgttggaacacccccacgcaggagtaggtggtgcccaggtcgatgccgatcgccgcggctttggccatgccggtgccctgctctgtgggctccgctctgagactgggggctggaaacggcggacgggatccgcgacaagagctcagtccttcggaacgccggaaactcaacacgccggtgcctgcagccgcacaggttcgctctggaaagccttgggaccgcgggagtcactctcgaaagacgaagcggaccctcgcagcagctcctcaggctggccgttttccggaccgcgcgcccctcggcttttataagtcgtcgtggagacccgcctttccccttctgagccaatcaccaagctcgatgaggctgccaggtcgggaatattccaggggtttcgcctcccgtcctgccccccagccttccttggaccaatcagagggcagggtgccgccctctgctcagaactctccagagtcttctgggattcactggaggggacaggggccctgagagaaagggggagtggtggtgggaagggtgttggtctccatggcgatgctggccgcctgcccttcagtaggtaattgacaggaagggcccgctctgggcggtgcgagattggtcggatgactttggagacaaccagaacccgaaagttaccttgtttctcgaaggaggcggtgcatcgatgtgcctgggaaactctgattggactgtgtctgtgaaggacggagcagccttgggtcctttctccgaggcacctaatggcctagtctgcctgagaaacggaccggctctcccggatgttttttccgtcttaatgggaaggagaaggaaagagataatgcaatatagtttttgacataatctttaacctacaaggatagaacaactgggaataggagcctttaaattttcacaaggaaagcagttgtgtaaacaggcagttcttagcaagacaggggcacccatccaaggaggaagggaggcgctggtcgggtaatgggagcagtgggtccgccgcacccctgtccccgccctcagccgctcccctcagctgcaaccaggagttagaaaaaaattttccttagtatgtaggccgtccttaaggcatttgggattcctccatttccctccccattcctagcttggggtctgggacacctccttcctactttctcaattcctggttcactcctggacagtgtgtagaagtaggacctcacagtcccgagtaagattttctgtctgtccctgaaacccctaggctgttaccgtttttaggtcaaatttaacaagatggtgaccctgggagggaggtgcggggggtgtttagctctctttaacatcacatactacagctgtttggcaggtggccctctttaagcaaactgtgtggagtgatgctggaaagcaggaggggttgggacccaggttctagttactagctcctcttaacacctcaggttatgtgtcttaagtttgttgttttcgttttgagacagtctcgctctgtcgcccaagctggagtgcagtggcgtgatctcggctcactgcaacctccgcctcccgggtttaagcaattctcctacctcagcctcctgagtagctaggattacaggcgtgcgccaccacgcctggctaatttttgtatttttagtagagacagggtttccccatgttggtcaggctggtctcgaactcctgacctcgtgatccgcccatgttggtcaggctggtctcgaactcctgacctcgtgatccgcccacctcgggctcccaaagtgctgggattacaggcgtgagccaccattcccggcctgttgtttttgtttgtttgttttgagactgagtctcactctgtcgcccaggctggagtgcagtggtgagatctctgctcattgcaacctctgcccctggggttcaaacaattctgctgcctcagcctccccaatagctggaattacaggatgtgccaccacgccgggctaatttttgtatttttaatagagacagggtttcgccatgttggccaggctgaatgtgtctaagtttttatcctagattccaacttcctgcggattctccttcctcctgttttaaatacggttgcatttagtaatttactttccctttgtttttttccttcattcttagtgtgaatgcaagaccctttgttaggcgtctgaaaggaaaatgtgagggggttgaagcaatagtactgtgtttacaacctaccacaaaaaaaaaaaagaaaagaaaaaaaaaatagcctcattgccatggcgatattccttgagcacaaatgaaaggaagaagttactgatgaaggaataatcctgtttttaaacactttgctcaattggcacttttcatatgcacacctgcacacacacacctgtccactatcaaaacacctcttcctggaatttaagggtattcatttgtttataattcactgatctaaactcatgttgcaaataaattgctttaacaatatgtgtgtgtctgtatgtgcaggtaggtgataactttcacattcagctttagctccctaatgaatcacctctctaaactagtcaaaccggtcaaacttcaggaattttcccaaacatttctctatgaaatgtctggctggagattctcccaaactatgttcatcttagctgcacagtgtatcaacacttccagagacccttaacctcacccctccctctggaaacttcctcaccatcaactgctactactggcaggtctggattcattccttccctccttccaaatccacaatttaaaaggccagcacagtggctcacacctgtaatcccagcactttgggaggccgaagcagcagatcacctgaggtcagaaattcgagaccagcctgaccaacatggagaaagccggtctctactaaaaataccaaaaaaaaaaaaaaaaaaaaaattacctgggcatggtggcgcatgcctgtaatcccagctacttgggagtctgaggcaggagaatcatttgaacccaggaggcggaggttgcggtgagccgagatcgcgccactgcactccagcctgggcaacaagagcgaaactccttctcaaaaataaaatacttctctgattctgctgagaaacataaaaagtggggagtggggggtgggagagggggagaaaaaacctctctattggcatgaagcaaagggcatcactgtctcaactgcctagcaagtagatgtggtgttgggaccccaaatcttgggtgctctctggatagcagaaaaatccaatataaatgctgtttttcttcaatcagtcacactagtcagagtctacagtgctatagttgacctagcttttaagtgaagcctctgtggactagactggaaacccacacatacatattccttgtccatttcctgacaaggagagggtcacctgaattttcttttttttttcttttttttttttttgagacagagtcttgctctgtcgcccaggctggagtgcaatggcacagtcttggctcactgcaacctccacctcccaggttcaagcgattctcctgcctcagcctcctgagtggctgggattacaggtgcacaccaccacgcctggctaatttttgtatttttagtagagagggggtttcgtcatgttggccagtctggtctcgaactcctgacctcaagtgatccgcccgtctgggccgcccaaagtgctggaattacaggcatgaagcaccacgccggccttttctttcctttcagactggatgcttcccaaggcagaaatccagtcacaagtttaattgctgtctaaggtgaatatataagaaccccaggagatttttcagaactttaatgtgattaatttcagaattaggtttttattggattctgtgtttggaaggatcagagctcagagtccccaaagtgaaagccaggttagatgctttcaaagggacaagagaactgaagagggagtgccaagaacataattgctacagcagtgtggggtaagacagccttcttcaggctgacgctgcagggtcttttccttccttctccctctcctttttatagttcctcaaacagtagttttcttaattttgttcattttaaaagatggtataggccgggcgcgatggctcatgcatgtaatcccagcactttgggaggccgagatgggtggatcacctgagatcaggagttcaagaccagcccggcaaacatggcaaaaccccttctctcctaaaaacacaaaaattagccggacgtggtggtgcacatctgtaatcccagctactcaggagctgaggcaggagaatcacttgaacctgggaggtggaggttgcagtgagctgagatcgcaccactacactccagtctgggtgacagagcaagactctgtctcaaaaaaataataaattaaaaaaaaaagctgttataattttaagtttatccaaatgaacttaaatgaaagcaaaagagttaattgatatgaaatctagaggcaggcattcttaactgaatgaatgacaaatgcttcaatgacaaagagaaccctggccatttctagcagcatggaaagaaaaaatctgggaagggaaaatcctggatttgcatctgcgctctacttctttggtgaggctgtttttcttttcaacaaggaagtacttgtacattgactaaataacacaagtttcgacgtgttcatctctaaaacataattaacaataactgaactgcgtgtggtgactcaggtcggtaatcccagtgctttaggaagccaaggcaggcacttgaactcagaagtccaagatcagcctgggcaacatagtgggacaccatctctactaaaaactttacaagttagctgggcgtggtggcaggtgcctgtagtcccagctacttgggaggctgaggcaggaggatcgcttgagcacaagaggtcaaggctgcagtgagctatgatcacgccactgcattccagcctgggagacagagatcctgtctcgaataaaaaaattttttttccctacatgatcaaagagaatatgatcttctccctccttttattggggatcccatactctcggatatgactcgtagtcattcttatttaggtgtttaaaagttggggaccattattaggactacagctgctttcagcttaatgtaaaaactgtcctaagatctgcgggcacaggccattcagtcaaaccttttcattttcaaagacagcaccaaggatcaaagaagttcagtggcttgatctggttacccagatgacaggttacagaaccggtgattggacccacgggttctgacactcattttgtactccttcccacattggctcatcaacctaactgggttttgtttgcttttaattttgtggttagacctaattgttttattctctaaagaggaaaacaaatgaatacagtgttggcctctgcgagcattaagggcaccacgggtatgtgatcagccagggactcccgtcctggctgctgctctgctcttcggactcaagaccatggcccctacaagctcttgccttccccaccttccagctctcccagccctgcctctcctttccgatagaacagattgctcaagcagaaagaggggaaaggaggggggagccccgttactagggcaaggttggcatatagttcacagaatcttccggacgttaaatatagagtcctgactaaccttgatgttttagggccggctggcgagaggagggagagactcgggtggcgcagtttgttggggagtgtccctaagaatgacacagcagttctcgccttgaaggtcagaaaactctagaaacttcgggcagagccagcgacgggggaaaaagcctcagccaaaggggaggaaaggtggggagtgcgggggggggggcggggggagaaaaggcggggccgctggggcctgagggcggggctggcttcggggctgcctatccgactcctgcgttttctgatgtttttttttttccaaaaagggattaaaggaggaaagaaaggacctttcgagtttctctcatactaggtgatttacaagacgaaaatattggagaattttgtaactttcatacaactaaatcagatgcattgggtggccagaggcgagaagagaaggtccccaccgcccacggccagcgcgcacccgtctgcgcggggacgcgcgactgatgggagagtaggggatggagtcggttggcttttgcctacagccagctcagcgccccgttctagtccctcgccccgtgaggcatcaggagagtaagaaaattagaccctcaggagtgattctcggttgctgggctcctccgtagtcccagcctgtgaacctgctccagccctcctctggtgccctcccttctaatttttttttttttcacttttttttgaggcagggtctcgctttgtcgcccagactggagtgcagtggcgcaatcacggctcactgcagcctcaagcgatcctcccgccccagcctcccgggtagctgggactccaggcccgcgccaccacgccctgctcctctctcctccaattcttgatcgggctggacgtgggccagcggggtggggcgggtttaactccgtgtctggaatgctccgctgccctacccctcaaacatccctttaaatggtggtgctaggaaaggacgagggcccggtgggtttactccctctggctgaactacacctgatagatacctcaggggcgtttcccaaggggatggatttagatcagttagcaggaggaatggtggctgtcacaattttttatattcacgtaaggatcgctccctcagaaatcgccaatattggctcccccaagaaataacctcatttccttttttagcctaaagccgtattatttctgcccacttctctcacatctataaaatactgtagttaattttttgttttggtaccttttttgtctttttgaggatgacaagaactcttgaagaccaggaataacagtaagtgtatatgttataaaataaaatcctgggttcaaagccatataaaatcaaatttattatcatagcctgctgccttctgaggcctggtataggaaggtaggaggtgattggaattgagaagatatttatatttgtttttccacacctgcagttatttttcctgttgcactttcctccctcaaagttcctctgctcctcaaaacatcactccgtttatgggtggcactgcattctctttgctaattccacagctccctcaacgtcttttcttgaggttacaaagtgaatatttcaaggtacagtactctgtgctagggtatgcaggcaaacaattttttttttttttttttttttttggagacggagtcttgctctgtcgcccaggctgcagtgcagtggcacgatctcggctcactgcaacctccacctcccgggttcaagtgagtctcctgcctcagcctcctgagtagctgggattacaggcgcccaccaccacgcctagctaatttttgtatttttagtagaggtggggtttcaccatcttggccaggcttgtcttgaactcctgacctagtgagccacccgcctcggcctcccagagtgctgggattacaggcatgagccaccacgcccggccgacaagtaataatttttacatatttcttgttaaaacacctactaataagcttgatagggccataggaactctcttattgcctccattcaatgttatgtctgatgacttctctactgtgtcaacaaaggcatttggtaggtccttccccatctccacccttttccaattacctttttccccactccatgccacagtagtggtagttgctcctggtttagagtcactacagggtctgcagatcagagtcacaaatgctactgcagctctgaaggggagaggaggtcctatagcaaaggcatattcccatgaagattgatttacattgtggccagagtccacagtactacagtttaactaccataagagataaatgttcctctgtagactggcctggaaacctaagcatttcatatttattttctattttcaaacttccaaagcaaggtctacctttatgtatcatttcccataacactggattttcttcattaacaagtatttagtgaatggtttgatgggctttgaggtacacataagctcataaagtgctttaatgtaatattgatacaattgatttttttttcttttttttttttttagagacagggtctcactctgttgctcaggctggagtgcagtggtacagtcatggctcactgcagccttgacctttacaatgttatgcaaccgtcaactctggttccaaaacattttcatcgcccttagatactatttatttatttattcactgagacagaatttcactcattgttcaggctggagtgcaatggcacgatcttggctcactgcaacatccacctcctgggttcaaccgattcttctgcctcagcctcccaagttgctgggattataggtgcccgccaccacgcccagctaattttttgtatttttagtagagatggggtttcaccctgttggccaggctggtcttgaactcctgacctcaggtgatccacccacctcggcctcccaaagtgctgggattacaggcatgagccactgcgcctggccgacacaatttttattttttgagatggagtctcgctctgtcacctaggctggagtgcagtggcgcaatctcggctcactgaaacctctgcctttgagttcaaacgattcgcctgcctcagcctcccgaatagctgggattacaggcgcacaccatcgcgcctggctgatttttgtacttttagtgcaggaggtgggtggtggggggggtcctcaccatgttggccaggctggtctcgaactcctgacctcaggtgatccgcctgcctcagcctcccaaagtgctgggattacaggcatgagccagcacgcccggccagatacaattcatttttaaaagggctcactccgggagctttaaggattgtagtgggcgttttccaaggaggagggaattacttctaggatgctagcggctggggcatgaagcatctccaagggaaagtgcatgggagtgaagtctgtaggtcttcctggcccgggtgctcactggcgtacttaaattgtaggtgataactgctaagaatgtgacatttctatttcagtatgctttcagtcatgagagaggcatcgagccaaacccttccattttaaaagatgacaactaaagcacatgtgtataactcagcaagccagtgaatgtacccgttttttcactttgaaatttaggacactccttccattccatgttgaatctagattaagtatcaagtccatgagcatatcaggtgtacctacaggaggtaggagcgctggcctcccatctaactgcattctttttgaccacttttgcagaaacatccccgcccccctcccacctcttttgagaccaatcttacacaaacatcactttaaggctaccctcccaggtgttaaactttttctgtaccctcaggctaaacccaatcagcatcaacaaactttacttttttgtgtgtgtgtgtgagacggagtcttgctgtgatgcccaggctagagtgcaatggcgtgatctcggctcactgctaccactgcttcctgggttcacacgattctcctgcctcagcctccctgggactacaggcacgcaccaccacgcccagctaatttttgtgtttttagtagagacagggtttcaccacattggccaggttggtctggaactcctgacctcaagtgatccgcccacctcagcctcccaaagtgctgggattacaggcttgagccaccactcctggccagaatcaagaagctttactggaggataccatttgtctaacacaaatggatcacattacaatagtcacacctctgcaaaatctgcccttactggaagcaaaaatgccattccattttagacgctatgggaaaaacaacctatgcagaccctactgacccccaaataaaggaataaaaggcatcacttgaattttaaagtttatttactttgaagtaaccaacttaaaaaatggcctgagttaagtgtattaaaaagaagaaatagtcgtaagatggcagtataaattcatctctgcatgtagaaaccggaaaaaaagcaagttcagtacttcaccaaaaaatttcaacattgcaaacacaggaaattgagaactgacaaacagaaatactaggaaatgcaaagtcttgaagctccaaaacaaaaacagcaatcttggaaaggcccctaatctacctcctcaatggtggggcctgacccagaccctcccttgggaccctgagccccgaagcccccaggcccgggaccaccggcaccctggtacagtccgctgatgatggggttacacacctgctccagctccttcctcttgtgctcaaactcgtccttctcggccaaggtgttggcgtccagccacgagatgacctcttgacacttgtccagcaccttcttcttgtcggcctcgctgatcttgcccttgagcccctcatcctccacggcgctcttcatgttgaaggcgtaggactccagggcgttcttggctgacaccctctcgcgctgcacctcgtcctccgctttgtacttctccgcctcctgcaccatgcgctcgatctcctccttgctcaggcggcccttgtcgttggtgatggtgatcttgttggccttgccggtgctcttgtccgtggccgtgacgttcaggatgccgttggcatcgatgtcgaaggtcacctcgatctggggcacgcccctgggggccggagggatgccgctcagctcgaagcgccccaacagattgttgtctttcgtcatggccctctcgccctcgtacacctggatcagcaccccgggttggttgtcggagtaggtggtgaagatctgcgtctgcttggtggggatggtggagttgcgcttgatcagggcagtcatcacgcctccggccgtctccagccccagcgacaggggagccacgtccagcagcagcaggtcctgcacgttctcggacttgtcccccatcaggatggccgcctgcaccgccgccccgtaggccacagcctcgtcggggttgatgctcttgttcaggtcgcgcccgttgaagaagtcctgcagcagcttctgcaccttggggatgcgggtggagcccccgaccaggaccaggtcgtgaatctgggccttgtccagcttggcgtcgcgcagagccttctccacgggctccagggtgcttcggaacaggtcggagcacagctcctcgaacctcgccctggtgatggacgtgtagaagtcgatgccctcaaacagggagtcgatctccaggctggcctgggtgctggacgacagggtcctcttggccctctcgcaggcggtgcgcagccgcctcacggctcgcttgttctggctgatgtccttcttgtgttttctcttgaactcctccacgaagtggttcaccagcctgttgtcaaagtcctccccacccaggtgggtgtccccggccgtggccttcacctcgaagatgccgtcgtcgatcgtcaggatggacacgtcgaaggtgcccccgcccaggtcaaagatgagcacgttgcgctcccccttgcccgttctgtccaggccgtaggcgatggcggcggccgtgggctcgttgatgatccgcagcacgttgagccccgcgatcacacccgcatccttggtggcctggcgctgcgagtcgttgaagtaggccggcacggtgatcaccgcgttggtcaccgggtagcccaggtacgcctcggcgatctccttcatcttggtcagcaccatggacgagatctcctcggggtagaatgccttggtgtcccccttgtagctcacctgcaccttgggcttgtctccgtcgttgatcacctggaaaggccagtgcttcatgtccgactgcaccaccgggtcgccgaacttgcggccgatcagccgcttcgcgtcaaacacggtgttctgcgggttcagcgccacctggttcttggccgcatccccgatgagccgctcggtgtccgtgaaggccacgtagctgggggtggtgcggttgccctggtcgttggcgatgatctccaccttgccgtgttggaacacccccacgcaggagtaggtggtgcccaggtcgatgccgatcgccgcggctttggccatgccggttccctgctctctgtcggctcggctctgagattgggggctggaaacggaacactggatccgcgagaagagctcggtccttccggacgccggaaactcgacgcgccggtgcctgcagccgcacaggttcgctctgggaagccttgggacaacgggagtcactctcgaaaaaggtagtggactgtcgcagcagctcctcaggctagccgttatccggaccgcttgcccctgggcttttataagtcgtcacggagacccgccttttcccttctgagccaatcaccgagctcgatgaggctgccaggtcgggaatattccaggggtttcgcctcccgtcctgccccccagccttccttggaccaatcagaggccagagtgccgccccctgctcagaactctccagagtcttctgggattcactggaggggacagggaccctgagaggaagggggagtggcggtgggaagggtgttggtctccatggcgatgctgaccgcctgcgcttcagcgcctaattgacaggaagggtcggcgctgggcttttaattgtgggggcttgctgggcctgcgcagttgtgggcagggggctggtgcggggagcgggttacgcgcgtccaggggagggtgggggcgtttgtgttgacaccgcccggccacgttacaatggagatactgtctctgacctcatgggccagtttggaaaaagattactgagttggagccgtctcaaatttgcagggagggacggggtggggggtggggggaccccggttgtgcagtttgatattgagggagcccccacctactcgctggggctgcgtaatctggacgtttccaaactgaagcgaaggcgtcgggagactaggtgagccagtagggatctgattgattgtgaacctgaaaggctcagtaggtccttgtttgggaaagtactggaaagttccctagttggtttaagcctgaggtatgtgggcgttggctgatccgggtaggaggagcacttggggaaagctaagatggcttcagattgattggtcggagcagccagaatgggggaggcgggggaagggagtgcggcctgtcggggaaatggggaggcggggaaggcggggtaagggggaggcggggtaactgggaagcgggggaaagggagtgcggcctaggaatctgcggtgtggagagggatagacactaaaccctttattttatttttatttatttatttttaatttttttttttttttgagacggagtctcgctctgtcgcccagggtggagtgcagtggcacgatcttggctcactgcaagctctgcctcccgagttcaggccattctcctgcctcagccttccgagtagcagggactgcaggcgcccgccaccgcgcccggctaattgctccacctcccgggttcaagctattctcctgcctcagccatccgagtagctggaactactggcgcccgccaccacgcccagctaattttttctattttttagtagagacgaggtttcaccgtgttagccaggatggtagccaggatggtctcgttctcctgaccccgtgatccgcccgcctcggcctctcaaagtgctgggattacaggcgtgagccaccgccccccgcccttaaaccctttattgatcagttattggctccagaaaacaggagttttatttaggagaaggatacagatactgtctggagtgccatgtcgtttgagaaaactggaaggcttgtggttttctagcagtcatcttcagcctgactggaatttactgccggtgaacccctaatagagaatattatcccaggaaggcagcagaactcaagtgtggaggctgatgtctcttgaagagaccagaatgtacactactcttgggtcataaagagacagaatcccacagtaaaatatataggaacaggacagtagaattaggtcacttgggaaattgaaaacaatatacagctacttgcttcccaacttctttgagtagctgagaatacttttgtctaccctgtccaaaaagcagtctgccatgacagtagcgtctccatgtatttgtataggcttgctcatagcaacattattctgtaaattctgtaatctgtatccatcgagagatagataagcaaaatgtatataggccgggtgcggtggtggctcatgcctgccatcccagaacttagggagaccgaggcgggcggatcacttaaggttaggagtttgagaccatcctggtcaacatggtgaaactctgtttttactaaaaatacaaaaattatctgggcgtggcagtgcacgcctgtagtcccagctcctcgggaggctgaggctggagaattagcttgaacccaggaggtggaggttgcagtgagccaagatcatgccactgcactccagcctgggtaacagagtgagactctgtctcaaaacaaaatcaaaaacagtggtatataaatatgaatattactcagccttaggaaggaaattgtgacatgttacaacatggatgaaacctgtgcacataagctaagtgacataagcaaagtcacaaaaggataaatactgtataattccacttatatgaagttacaagagtagtcaaattcatagagatagaaaaaagaggtcgggcgccttggctcaagcctataatcctaacacttggtgacttggaggtgggaggaggtttccttgagctcaggagtgagaaactagcttgggcaacagggagacctggtctctacaaaaaaataaaaaattagctgggtgtggtggcattcacctgtggtccaagctacttgggaggctgagacaaaaggatcctatgagcctgggaggtcaagactgcagtgagccatgattacaccactgcagtgcagcctgcgtgacaaaacgagaccctgtctctaaaaaatgagaaaaaaaaatgtttgttaccaggcgataaagggaggggaaaacgggagttacttaatgagtatacagtttcagttttgcgagatgaacagaattctggaaattggttgaacaccgctgtgattgaactcactaccaaactctacacttaaaaatggttaagatggtacaatttgtatgtattttaccacaataaaaaataaaaaataggctgggcgagatgttcactcctgtaatcccagtacttggggaggctggggctgaaggatcgtttgagccctgaaggagtttgagaccagcctgagcaacataaggagaccccatctgtacacaaaattaaaacattagccaggcagagagctggtcacggtggctcacgtatgtaatcccagcactttgggaggccgaggcgggcggatcacctgaggtcaggagtttgagaccagcctggccaacatagtgaaaccgtgaaaccccatctctactaaaaatacaaaaattagctgggcgtggtggtgccctcataatcccagccactcgggaggctgagacaggagaatcgcttgaactcaggaggtggaggttgcagtgagcctagatcacaccactgcagtccaaagcaagactccgtctcaaaaaaaaaaaaaattagccgggcatgttgtctccagttattctggaggctaaggcaggaagattgctggagcctaggagatcaaagctgcagtgagctatgactgcgcctctgcactccaacctgggtgacagaggaagaccctgtctcaaaaaaataaataacattgaaaagcactctcccaaaacagtatcttattctttctccataggcctcagagaaccatggctactgccaagggaatcgccataggcatcgacctgggcaccacctactcctgtgtgggggtgttccagcacggcaaggtggagatcatcgccaacgaccagggcaaccgcaccacccccagctacgtggccttcacagacaccgagcggctcattggggatgcggccaagaaccaggtagcaatgaatccccagaacactgtttttgatgctaaacgtctgatcggcaggaaatttaatgatcctgttgtacaagcagatatgaaactttggccttttcaagtgattaatgaaggaggcaagcccaaagtccttgtgtcctacaaaggggagaataaagctttctaccctgaggaaatctcttcgatggtattgactaagttgaaggagactgctgaggcctttttgggccaccctgtcaccaatgcagtgattaccgtgccagcctatttcaatgactctcaacgtcaggctactaaggatgcaggtgtgattgctggacttaatgtgctaagaatcatcaatgagcccacggctgctgccattgcctatggtttagataaaggaggtcaaggagaacgacatgtcctgatttttgatctgggtggaggcacatttgatgtgtcaattctgaccatagatgatgggatttttgaggtaaaggccactgctggggacactcacctgggtggggaggactttgacaacaggcttgtgagccacttcgtggaggagttcaagaggaaacacaaaaaggacatcagccagaacaagcgagccgtgaggcggctgcgcaccgcctgcgagagggccaagaggaccctgtcgtccagcacccaggccaacctagaaattgattcactttatgaaggcattgacttctatacatccatcaccagagctcgatttgaagagttgtgtgcagacctgtttaggggtaccctggagcctgtagaaaaagcgcttcgggatgccaagatggataaggctaaaatccatgacattgttttagtagggggctccacccgcatccccaaggtgcagcggctgcttcaggactacttcaatggacgtgatctcaacaagagcatcaaccctgatgaggccgtagcatatggggctgcggtacaagcagccatcctgatgggggacaagtctgagaaggtacaggacctgctgctgctggacgtggctcccctgtccctggggctggagacggctgggggcgtgatgactgccctgataaagcgcaactccaccatccccaccaagcagacacagattttcaccacctactctgacaaccaacccggggtgctgatccaggtgtatgagggcgagagggccatgacaaaggacaacaacctgctggggcggtttgacctgactggaatccctccagcacccaggggagttcctcagatcgaggtgacgtttgacattgatgccaatggtattctcaatgtcacagccatggacaagagcaccggcaaggtgaacaagatcaccatcaccaatgacaagggccgcctgagcaaggaggagattgagcgcatggttctggatgctgagaaatataaagctgaagatgaggtccagagggagaaaattgctgcaaagaatgccttagaatcctatgcttttaacatgaagagtgttgtgagtgatgaaggtttgaagggcaagattagtgagtctgataaaaataaaatattggataaatgcaacgagctcctttcgtggctggaggtcaatcaactggcagagaaagatgagtttgatcataagagaaaggaattggagcagatgtgtaaccctatcatcacaaaactctaccaaggaggatgcactgggcctgcctgcggaacagggtatgtgcctggaaggcctgccacaggccccacaattgaagaagtagattaattctttttagaactgaagcatcctaggatgcctctacatgtatttcattcccctcatcttcaaacatcattattattcttgaccagacctgaatctaagttaccatcccttggaaattctggagaaggagtctcatgcaccacctatcacactccctcacatcctgtttctgactttggaatggactcaggaaaactaggcccctctttaaaccgtgtgatgtatttgaatgtctgttatttccagccaccctaacattcttcttcctgtgtggatgcttatttgtcaatcagtaaatttgttcgtaaagaaaattacttctggtatttaggctgtgaatgtaccttgaaggggagagttcatggagagagcatgtgttctctgattgtgaggtcactgtgaatgattaaattggtaagggtaaagtatttgaattttcatgaactcattttgtgtgtgtgtgtgtgtgtgtgtgtgtgtgtgtgtgtgtgtgttttgagagacagtctcgccctgtcacccaggctggagtgcagtggcacaatctcagcttactgcaagctctgcctcctgggttcacgccattctcctgcctcagcctcccgagtagctggcactacaggcgcccgccaccatgcccggctaattttttgtattgttttagtagagacggggtttcactgtgttagccaggatggtctcgatctcctgacctcgtgatccgcccgcctcggcctcccaaagtgctggaattacaggcgtgagccaccgtgcccggcccatgaactcattgtttcaatcagccacataatttttgatcctcagacacctttagcacagatggaacagatggcaaactataactgcttttaatcagttacaagctggttttggagtttaggactcaactgggggtggagggacaaatcctgcttgatgtcctgatgtcacttataggtaaggtccaggagattcagcatctatgcactcacagagttcattgtttacatccattacatggagaaaatatttcttttctttttttttttttttggaaacagtttcgctcttgtcgcccaagctggagtgcaatggcacgatctcggctcactgcaaactttgcctcccagattcaagcgattctcctgcctcagcctcatgagtagctgggattacaggcgctcaccaccatgcccggctaatgtttgtgtttttagtagagatgggatttcaccatgttgaccaggctgttctgaactcctgacctcaggtgatccacccacctcagcctcccaaagtgctggaattataggcgtgagccaccgtgcccagccccagaaaatatttctataacaaactcttgacaaataagtatgtctatgcaagatgacaaatacaagttttatgaagtctcagtccatgaaaaaatatttttaccagctgggcacagtggctcacgcctgtaatcccagcactttgggaggccgaggcgggcggatcatgaggtcaagagattgagaccatcctgcccaacatggtgaaaccccgtctctactaaaaatacaaaaattagctgaggacggtgatgcgtgcctgtagtcccagctactcaggagggtgaggcagaggaatcgcttgaacccgggacgtggaggttgcagtgagctgagatcgtggcaccacactccagcctggtgatagagcgagactccatctcaaaaacatttttttcttttacctgtgtcctaatacatatttataaaaacctgggggatatgagttagaataatatgtaactgcatttctgtctgtttgtgtttgaaacatttaacagtgaaatgttagactgggttatttgtatctgtgagccacagtctctttagttttacacagtcctttacaggacagtcttggcaaaagtgtgtaagaaatgcggagattgaggttggctcctttggagaaatgtatttattggtaacctttgataaaatcaaaatttgtgctccagctcctccttatctctgggactgctcaacgtttgtttgtttataattttcttttttctagagagagtctcgctctgtcacccaggctggaatgcagtggggagattgtagctcactgtaactcttgggttcaaatgatcctcctgcctcagcctccccaaatgctgggatttacaggcctcaacattttttgttttttgggatggagttttgctcttgttgcccaggctggagtgcaatggcaagatctccactcactgcaacctatgcctcctggatttacaggcgcgtgccaccacacccggctaatttttgggtttttagtagagacagaatttcgccatgttgaccaggctggtctcgaactcctgacctcaggcgatccacttgccttggccgcccaaagtgctgggattacaggtgtgagccactgctcccggtcatttttttttttttttttttttgagacggagtcttgctctgtcgcccaggctgcagtgcagtggcgcgatctcggttcactgcaacctccgcctcccaggttcaagcgattctcttccctcagcctcccgagtagctggtattacaggagcctgcgaccacgcctaattttttttgtatttttagtgaagatggggtttcaccatgttggctagactggtctcgaactcctgacctcacacaatccacccacctaggcctcccagagtgctgggattaaaggcttgagccacggccctcggcctttttttctttttatcagctgaatttaagattcaaaacattttttaattttattttttaaattttatgtttttactttaacaaatatagaaaagtgcacacttcataatcttaacaaactccccacaattctcgataggaagtgtgtgtagggcacaaacacatcacgctgtagatggcaggattctggaaaagaacaaaatcctttgagctcaggcgctgagtcccgccacccgtctggcagcccaggctagggtccgcgcctgcgcaatgggagccggccggccagggaggaagtcggaatgaaggaaaccccgcccctttcccggcttcctcctcccctctactctacccagcttgcgctccccagccgcaagtcggccgcgctttgcccgtcagcgcttggagctttctgcgtcgcttcccgctgcgcctgcgcggtcccgcctcgccccacgcgcgggctcgcgcttcggtttccccagacctgctcgcagcaccctgctgtcttcccggtccggcccgctgcccgcggcgccagcaccatggtgggtaccgtgacgtcaaaagggggcgccctcggggacctcgcatggttggggcgggggatctggcctttgtacccctaggctggagttaggtccggagtttttatcttcatctttagtactgtactgtttctcaggttcattgaggaggcactgagaacaaatgggatattttttccatgatgagggaaaaaaccccaaccctgagagagattcagtgaggatagcgggagacggaaaagttagacctcagagcacttctctgccaggcaagcttcggcagggtgcgggtgggatattttctacaattcattgaaaggagtgggcaggtacccgagaaaggtggtcgactgagagagcacagtggggaggccgacgtatgcagggcagagtctctctgggactttaagtgatgggctcagtgcagtgtgcagaataatttgggctccagcctttcagctctgtcaaccaattattctttcctgtgaaattttgagaactgtcagggatgcagtggggttcacaataccagtatttggtaatactgtcaaaggacactcctccctaccatgctccttcccacatgatggttttccccctctctcccaatagctcttctattcttttttcaagtcccttgtgggcaaggatgtggtcgtggaactaaagaatgacctgaggtaggtacctgttccaacaagtctgttgggggtgggtgtgcccagggccctggaacctctttaatttgagaaatatttcagggctaggcgaggtggaagatgtacagaagaaataaatggatagggtgcagtggctcaagcctgtaatcccagcactttgggaggctgaggaaggaggaaagcttgagcccaggagtttgaggctgcagtgagcagtgattactccattgcactctagcccaggcaatagagcaagaccccatctctaagaaaaattttaaaatttagcaataaataaatgccttgtgccttaaatttacagataagcttagagattgtatcgtgtattggaaaacaatacaaagcaatatatagtttaaagagtaaatacaggtcaggcgcagtggctcacgggctggacgtgtggctcatgcctgtaatcccagcactttgggaggccaaggtgggcgaatcacgaggtcaggagttcaagaccagcccggtcaagatggtgaaaccctgtctctactaaaaatacaaaaattagccgggcacggtggctggtgcctgtaatcccagctactcgggagggtgaggcaggagaatcgcttgaacctgggcggcagaggttgcagtgagctgagatcacactgctgcactccagctgggtgacagagtgagattctgtctcaaaaaaaaaaaaaaagtaagtactaggctggccatggtggctcacacctgtaatctcagcactttgggaggctgaggcaggaggatcacttgagtccaggatgtcgagactagtctgggcaacatagtgatgagacctctatttctataaaaaattagccaggtgtagtgtacatgcctgtagtctcagctattcgggaggctgaggtgggaggatcacttgaacccaggaggtcaaggctgcagtgagccatgattgtatcactttactccagcctggttgacagaggaagactctgtctcaaaaaaagaacaggccaggccgggcgcggtggctcacgcctgtaatcccagcactttgggaggccgaggcaggcggatcacaaggtcaggagattgagatcatcctgtttaacatggtgaaaccctgtctctgctaaaaatacaaaaaattagccaggcgtggtggcatgctcctgtagttccagctacttgggagtctgaggcaggagaatggcgtgaacctgggaggcggaacttgcagtgagccaagatggtgccaccgcactccagcctgggtgacagagcaagactccgtctcaaaaaaaaaaaaaaaaaaaaagaaaaaaaagaacaggccataggctgggcacgatggctcatgcctgtaatcccagcactttgggaggctgaggcgggtggatcacgaggtcaagagagcgagaacagcctggccaacatggtgaaaccatgtagtgtatctaatacctagcataggccagttatatgataggtgcttaaagaaagaaaaataatatccgaagacgtattgactaaccactattctgaatacatttattgattgatttctcaaacactgctaagtaatatatactattgctgttttacacgaggaaactgaggcttagatcagctataccacttgttcaagtctacaaaactagtaagtgacacaactgaaatatgattctgtccagctttttttctttctttttttttttttttgagatggagtttcagtctgtcacctaggctggactgcaatggcgtaatctcggctcactgcagcctctgcctcctgggttcaagcaattctctgcctcagcctccctagtagctgtgattacaagtgcccaccaccatgcccggctaaattttgtatttttagtagagatggagtttcaccatctaggccaggctggtcttgaactctcgaccttgtgatccacctgcctcagcctctcaaagtgttgggattacaggcgtgagccactgcgcctagtcctactttctttcttaaaataatatttatttatttaaaaattagagacagtgcctcactttgttgctcaggctggtttcaaattctttgagttcaagcagtcctcttgcttcagcttcccaaagtgctggggttacgcgcatgagccagcacacctggccctgtacttatctgtacagtcctttaaataatatgtacatttaggccagatgcggtggctcatacctgtaatcccagcactttgggaagtcgaggcgggtggatgcctgaggtcacgagtttgagactagcttggccaacatggtgaaactccatctctactaaaaatacaaaaattagccagatgttgtgttgtgcgcctgtaatcctagctgctcaggagcctgaggctggagaatcacatgaacccgggaggcggacgttgtagtgagctgagatcaggccactgcactccagcctgggcgacagactgagactccatctcaaaaaaaaaaaaaaagtacatttaaaatattgatacctgttacctcattatcctttagaaagatgggatcaattgtattctcttcccaaaagcgtcttccacatttatttttttgagatgggggtctcactctgttgtccaggctgtagtgcagtggcaccaccatagctcactcagcctcctgaatagctggggctatatgccaccatgcccagctaattttttaattatttggagaggcagagtctcactgtgttgccgaggctagtctgaaactcttgggctcaagcagtcctgccaccttggcctcccaaagtgctggaattacaggtgtgtgccactgtgtctggctgtcttccacatttctatgtgagataattttttcatgggttacacgttgacagggcagggaatggtgaggagagggacttaagggcctttgcgttttagaacacaggtttccatttgtagcactggcaatgcaagtgatattgatgtgtatagattggggccacagagcaagacaagtacggtaatcactatcagtcttaggcaatttggtgtgatgacttgtttttgattctcctcttttctccttcctgggccttttacatgggaagcctaactgttgtgttataaccctaggccctaaagtacctttattttttttattttattttgtttttgagacagagtcttgccctgtcgcccaggctggagtgcaatggcgtgatctcggctcaccgcaacctctgcctcccgggttcaagtgattctcctgcctcagcctccctggtagctgggattacaggcatgcgccacaacgcctggctcattttttgtatcttcagtagagacagggtttcaccatgttggccaggctggtctcccaactcctgacctcgtgatctgcccaccccagcctcccaaagtactgggattacaagtgtgagccactgcacccggccgtagtaacatttcttttctttttcttttttcttttttttattgagacgagtctcgctctggtcgagtctacgccaggctggagtgcagtggtgctgtaacctccgactccctggttcaagtgattatcctgcctcagcctcccgagtagctgggattatatgcatgcaccaccacgcccagctaatttttgtatttttagtagagaaggggtttcaccacgttggccaggatggtctcaatctcctgaccttgtgatctgcccacctcggcctcccaaagtactgtgattacaggtgtgagccactgcgcccagccttcttttttttctatttatttatttatttttgtttgagatggggtctcactctgtcacccaggttggagtgcagtggcatgatctcgggtcactgcaacctctgctgcctgggttcaagtgattctcctgcctcagtctcccaagtagctgggattacaagtgcctgccaccatacctggctaatttttgtatttttagtagacatcgggtttcaccatcttcgtcaggctggtcttgaactcctgacctcgtgatccacctgcctcggcctcccaaagtgctgggattacagacgtgagccactgcacccggcctttttatattatttttaaaatttttcatagagacagagtctcggccgtgttgcccaggctggtcttgaactcctggactcaagtgatcctcccacctcagcctctcaaagtgcagtgactacaggtgtgagccaatatgtgtgtggctttaaagtgacttttctgttgggatgagaaagaagatctttctccttttttttccttgagacagggtctcactctgttgccctggctggagtgcggtggcgcgatcttggctcactgcaacctctgcctcctgggttcaagtgattcttccacctcagcctcccgaatagctgggattaccggtgcatgccaccactcccagctaattttttgtatttttagtagggatggggtttcaccatgttggccaggctggcctcaaactcctgacctcaagtgatcctcctgcctcagcctcccaaagtgctgggatcacaggtgtgagccaccacgcctggccaaaagttctttctcttatgtttgttgtcagaccacttttgtgctatgtatctccccctccttaagggacttaataaaatgacaccactttgtacaattcccaaatgttatttcactgctggagatggtggggtgctgtcaaatgtttttcagcagctagcaatatggtgagaacattactgaggcagtgggtttcagatactgggtgtttgtttttgtttttgttattaggcagagactcaccctctgtctcaaaaaaaataatgattgcctagtactagttcatttaaattaatttcctagagcatatttaagtgggtctttttttttttttttttttttttgagacagatccttactctgtcaccgaggctggaatgcagtggcatgatcttggctcactgcaacctctacctcctgtgttcaaatgattctcgtgcctcagcctcctgtatacctgggactacaggcatgcaccacacacagctaatctttgtatttttatattttatttttaaattttttttttcctcctgggttcaagtgattctcgtgcctcacctcctgagtagctgggattacaggtgcacaccacaatgcccagctaatttttgtatttttttttttttgagacggagtcttgctttgtcacccaggctggagtgtagtggtgtgatctccgctcactgcaagctctgcctcccagttcacgccatttttctacctcagcctcccaagtagctgggactacaggtgcccgccaccatgcccggctaattttttgtatttttagtagagacggggtttcaccgtgttagccaggatggtctcgatctcctgacctcgtgatccacccgcctcggcctcccaaagtgctgagattataggcgtgagccaccacgcccggccaatttttgtatttttagtagagatggggattcgccgtgttggccaggctggtcttgaagtcctggcctcaagtgatccgcccaccttggcctcctaaagttctgggattataggcatgagccaccgcacatggcctagacgctgggttttaaagactttcagaattttacaaaaattggggcagagaactgccaactttatttttggcaagataaggacgtttttaaaactgctatttattacgattatttttatttatttatttttcttgagatggagtctcactctgtcacccaggctggagtgcagtggctcgatctcgcctcactacaacctccacctcccgggttcaagtgattctcctgcttcagcctcccgagtagctgggattacaggcgtctgccactatgcccagctaattttttgtatttttagtagagatggggtttcacgatgttggccaggctggtgtcgaactcctgacctcgtgattcgcccgcctcgtcctccctaagtgctggaattataggcgtgagccaccgtgcccggccacagttattttattttataactttaaaatagagatgaggtcttgctatgttgtctgggctgttctccagctggcttcaggcgatcctcctgcctcagcctcccagaatgcttggattataggcgtgaacaaccattcccagccaaaggctgtttttttaaatttttgcaccattctctcaaagagcactggtgttttgatagcattcctcaaatagcatttcaaggggctcgaggattggggaatggagaggacatcactcatgcctgcatcatcaagagtaatgctacctacctttatccacatatgggctctggttccaaagcaataaatgtttgaaaatagctagcctgggtgacattcacagtgagaccctttctctacaaaaaaaaaaaaaaaaagtcgggaatggtggctcatgcctgtaatcccagcactttgggaggctgaggtgggcagatcatgaggtcaggagatcgagaccatcctggctaacacggtgaaaccccgtctctactaaaaatacaaaaaattagccaggagtggtggccggcatctgtagtcccagctactcgggaggctgaggcaggagaatggcgtgaacctgggagatggagctttcagtgagccgagattgtgccactgcactccagactggccgacagagcgagactccatctcaaaaaaaaatcagctgggcatggtggctcaagcctgtaatcacagctactcaagtggccacagtgagccatgatcacgccatttcactccagccttggccatagagtgagaccctgtcgcaaaaataaaaaaaaaatagctgatggttttgggagtcacacagacttggactgaagttcccatttgttctaaactcataaagtttaaaacaacctctctgagcccctggaaggtaataactactttgaaagatggctgtaaagattacaaatactatatagaatacaggtctagcctttaccagttgtttaatggtagctgttaagaataggttggtttggccggggacagtggttcacacctgtaatcccagcactttggggagctgaagtgggcagatcgcctgagatcaggagttaaggaacagcctggccaacatggtgaaaccccatctctactaaaaataaaaaattagccgggcatgatggcatgcgcctgaagtcctagctactcaggagactgaggcaggagaatcgcttgaacctgggaggcagaggttgcagtgagccaagatcacaccactgcacttcagcctggctgacagtgagactccatctcaaaaaaaaaaaaaaaaaaaaaaagaatggattggtttagggagaggagatgtggggttgaaaataaactactctgttagttgtctttcctactccagggcttaggaatgcccccttttggttctaccttttctgacatcctcaagtccttgacttctcccagtcatgttctcatcccagctctgaagtcacctctatgttgactttgttataaactaatttgattcttctctccctctgcccttgacagcatctgtggaaccctccattctgtggatcaggtgagatatagcacgggccccagaattggttcctggagaaggagaggggagacttaagggttgggttcttacatcatgtctctagggttaataatggtgttcgtcggccaggcacggtggctcacgcctgtaatcccagcactttgagaggccgaggcctgaggtcaggagttcaagacaagcctgacaaacatggtgaaaccccgtctctactaaaaatacaaaaaattagctgggcgtggtggtgggcacctgtaatcccagctagtcgagaggctgaggcaggaaaatcatttgaacccaggaggcggagattgcagtgagccgagatggcaccattgcactccagcctgggcaacaagagcaaaactcttgtctcaaaaaaaaataataataataataatggtgttcatcttcctttcctagtatctcaacatcaaactaactgacatcagtgtcacagaccctgagaaataccctcacatggtgagttggggtctgtggagaagaggaaacacctctaaagcaggaggcccctgggtggttagaggacatttttaagggtgttttcatatttgtccatctttgtctagttatcagtgaagaactgcttcattcggggctcagtggtccgatacgtgcagctgccagcagatgaggtcgacacacagttgctacaggatgcggcaaggaaggaagccctgcagcagaaacagtgatggctcctcctcctcttcccctccctctttcattggtgacccataaccccaagtcccagcccagaacccctaacccccaatacttgaaggggttttgtttttttactaatgatggttttgtgggttttttttaagggatgagtggatgagaggagtaatagggaacagctatcctctcttgagaaggggaggataagtaggctgggaaacttcaaagccttcccagtccccagcacctgcctttctcactacttctctggagatggtaggagagtttcctaggtctttccagggcagcatgtgattcatttggggatggaaggaatctgtcccgcatcgggaataaaatttatgatgcaaatttgtgttttggttctgttactatgtgttgggcagggggctgggacatggaaaaggatgtcgaattcatccaagcccctgttactctgcgttaacccagccaagaatccaactcagcttcccactactctccttggtataaagcatataatacagttgctctacaccatgtttccccaacatgtccctacctgtatgttctccctgtggccttttgcttataccatacctgcaactggagtgcttgctgtccttccattaatgtgatagtgtcgtaagatacatttcatgctaccagacttcaccaatccaaccaaatcagttcatgttttctgaatatgtatagaagataaatacaagtgatgtaatttatattttagagaaaagttgtgactgggaattactaaacttcattcactcattcagcaaatatgagttcatgatacagatgagacttctcagccttaagggacccttagagaccatctagtgtgaccctcctttttgtttttgagacgggagtctcactctgttgcccagggtggagtgcactggcttggtctggctcactgcaacctccgcctcccggttcaagcgattctcctgccacagctcctgagtagctgggattacagatgcccaccaccatgcccggctaatttttttttttttttttttttttgagatggagtctcactttgtcacccaggctggactgcagtggtgtgatcttagctctgcaatctccgcctcccaggttcaagtgatcttcttgcctcagcttcccaagtagctgggcttacaggtgtgtgccaccacgcctggctaatttttgtatttttacaaatactgcagctctgtcgccaggctggagtgcagtggcacgatctcagttcactgcaacctcaacctccagggttcaagcaattccctgcctcaggctccggggtagctgggattacaggcgcctgccaccacacctggctaatttttgtatttttagtagagacggggtttcaccatcttggcctggctggtcttgaactcctgacctggtgatccacccgccctggcctcccagagtgctgggattacaggcgtgagacgggctttcaccaccttggccaggctagtcttgaacttctgacctcaggtgatccgcccacctcggcctcccaaagtgctgggattataggcgtgagccactgcgcccggccgtcacccttttttgatacatgaggagatgaggctcaaagaggaagctggacgccagggcctcggcaaatggacctccccttcggtcctcatcaggcggctccctgctgggcacctccccgctaccgggtggggaacgccctccaccggcagggccggccgaccctcttgggccagttccctagctgcccgctgggcgccgccctcgccacccggccgaggacccgcacaaggtgcccgtggcggcgcctgacgggagcgtcgtgctcaggggtgtcctctcgtcctgcgtccgcgcccagcgccccgcgccccgcgctgttcctcgtgagaccggcgggcggcgagccgcgcggcccccggggcagtgtcggacacggcgggcgcgcactcgcaggcggggcacggccgcccccgccaggacccgcaggcccggaaacgctccctgtcacaaaggggggaacacgtgggcgccggctgccggggcggcgatcttagggaactagggtcacctggagagccgcccaccgtctctgcccgctcgactcctccgcccgggccgctcggccggtccagccgcggccggcgcctggctgtgaggtggattcccggcccagtctgaccatctccctccagtacgtacacgcggctcgaacccgcatccaaccagacgccgacccgctcctgagagccttccacactccccgaagccccgcgatggtggatagttcctcttccccaggaactccccactgacactgcccctctgagagccaggtcctcggctcctgacagcctgcctggtcagaccctcagtcctatgggactcgggtgtctgcggcgaaggagctcccgtgagggtcccctctctactcaaacataggacccacctcgatcccgcagtcttcccctgtctctctttctccttaggtttttccacttcgttcggaccttctcataactatgtccaccctctacgtctcccctcacccagatgccttccccagcctccgagccctcatagccgctcgctatggggaggctggggagggtcccggatggggaggagcccacccccgcatctgtctccagccacccccgactagcaggactccctttcccccaccccgcctgccggccctggagcaggggcccggtgggctctgggtgtggggggccacggctgtggcccagctgctgtggccagcaggcctggggggcccagggggcagccgggcggctgtccttgtccaacagtgggtcagttacgccgacacggagttaataccagctgcctgtggagcaacgctgccggccctgggactccgaagctcggcccaggacccccaggtgagggggttgtacagaagagggggaggggagaaattcagaggagggaagcgaggactggaatggacaatgagacaagaaggtagtacatcagatgtgggaaaagagtgatcaaatcccagattgccaactggtatggtaaccctgggcacgtttcatagacccgctgtgtcttggtcttcctatgtctatgaacacgcaggcaagttgatgtaatgcttgcctcactgagttaataggattaaaagatgtgcgcagagcacatagtttagtgccaggcacttttaaagtctcttagtaaaagtttgatgagtctgaaattgatgaggatagaagttatttgaattgtaggaaaagactgggtgagggagagatgacaattgctgggaggagataaaagagaaatgaaatgaggaaggtaagtgagaggagagataaccctgccagattgtaactatcagtccttccaaaggagacctgtgccttggtgtactttcaactctgcctccttgcatggtattgagcacatgatggaaaattagtatttcttgaatggatgaatgaatgtggcagaccctgacttgctccctcatattgtgatcaccctatctacaatagagtccttgcattcagaatgtctgtccaaacaaacaaataaaatagagtccctctcttctggaattccctgtttgttcccctcttttatttcttttcttttcttttttttttttttttttgagacggaatctccttctgttgcccaggctggagtgccacggtgcgatggtgcgatctcagctcactgctcaagcgattctcctgcctcagccttctgagtagctgggattacaggcgcccaccaccttgtccggctaattttttgtatttttagtagagatggggttttgtcatgttgaccaggctggtctcgaactcctaacctcagatggtctgctcgcctcggcctcccaaagtgctgagattataggtgtgagccaccacgcctggcccctgttcccctcattctgctttatttttcttcataggagttaagaaaaatagggcacttcattttatatttgctcatttgttgttcccctacaagaatgttaactctaccaggtcagggttctgtccatctgttcgtgttttcctctcattccctggagaagtacttaatacatatttattgatgttctgaacctggcagttattgagatgcctcatataatctttacttctatgcttaacatattgcatctaacacataagtattgagtagggatttgttggatgagtcagaagtgttttgtttttttttttctgagacggagtctcgctgtgttgcccaggctggagtgcagtggcgtgatctcggctcactgcaagctccacctcctgggttcatgccattctcctgcctcagcctcccgagtagctgggactacaggcgcccgccaccacgcctggctattttttttttgtatttttagtagagatgaggtttcaccatgttagccaggatggtctcgatctcctgacctcgtgatccgcccagaagtatttttattgtgactatttgagtgaagaaatgggactcagaggtggtgatttgtgagagtggggtggagggaggccacatggattgggttgtggtgggagatggaggtgggccaaaccttgtctcacacttcttccccttcctgccaggctgtgctgggggccctgggcagggccctgagccccttggaggagtggcttcggctgcacacctacttggccggggaggcccccactctggctgacctggcggctgtcacagccttgctgctgcctttccgatacgtgagtcaccaggcctggggaagaacaagactgctctcctcagacctcactgtagggtgactgagaagagtcatttatttcctgttccaggtcctagacccacctgcccgccggatctggaataatgtgactcgctggtttgtcacgtgtgtccggcagccagaattccgagccgtgctaggagaagtggttctatactcaggagccaggcctctctctcatcagccaggtgaggaagggcgaggagttggaggataggggcttccctggggccttccatgcaactcactttctttttttcctagaaatggcagaatcactggggcagggtcctgcgggagaggagggagaggggggaggtcagcatgggcaagacctcgggcatctaaaataccccatctgaaacctagtatggccgtccaagagggtccccagctggctgagtctgaatttctgcacctctctctaggccccgaggctcctgccctcccaaagacagctgctcagctcaagaaagaggcaaagaaacgggagaagctagagaaattccaacagaagcagaagatccaacagcagcagccacctccaggggaggtgaggcgagggtggagctggaaggaaagttgatgtgtgcggtgatgggttggctgatgcctgggcctatgtcttctccctcccaagcagaagaaaccaaaaccagagaagagggagaaacgggatcctggggtcattacctatgacctcccaaccccacccggggaaaagaaaggtactaggagtgggaaggggctcacccctcagcagccccttctaagttttcaccctatcttgctctattcttgctctcaccactttgtttggtgaggaattgcagaccccctgccctgcctctaggcccctcaaatgcctgtcctatgatgtgagtgacggagatcccgatccctctctgccagcacgtctccttcccagagtgctcccagccacggcactgagccctcccttcctctcccccagatgtcagtggccccatgcccgactcctacagccctcggtatgtggaggctgcctggtacccttggtgggagcagcagggcttcttcaagccagagtatggggtgagtaggcactgctgcccaggcccagagtgggtggggtggggaagggcaggactgaaggatgtgttgcctgggaggggctgggagaggtgacctgaggccttaaacatgtgccatccttctccaccatcagcgtcctaatgtgtcagcagcaaatccccgaggtgtcttcatgatgtgcatcccaccccccaatgtgacaggctccctgcacctgggccatgcactcaccaacgccatccaggactccctgactcgatggtgagcttctatctgcaccttcctctggttccctctgcctagtctggctctctccttttccctgacagccccccgagcctctctccttctgggttggtgctcacttctgcccccagtggtgctacacttctctctgtcattccaatctgatcatttagcttcctctcctagtccagtactcccatgcaacaccgccacttgcagactctcttctatcccttctttctttatttaattttaatttaatttaatttaattttttgtaaagatgagttttcactttgttgctcagtctggtctccaactcctggctcaagtgattctcctgtctcagactcccagagtgctgggattataggtgtgaggcaccacacccagtctctcccttctttttctagtaacaataacattattttgaatttaattaggaacatatgaatatatatatttttttttggggggacagagtcttgttctgttgcccaggccggagtgcagtgacgccatctcggctcatggcaaccgctgcctcctgggttcaagtgattctcctgcctcagcctcccaagtagctgggattacaggaatgcgccaccacaactgaccaaaatatatgaatatattcttgtaagaaatttaaagtttcaaatctccttgaccatccccctccacacctacttcctcctaagatttagccattgttatcactttgatgtgtatcttcccagatctttcctatttacttacatatacacgtacccatagaaatttatagttctccttttgggtgagtcttttctattttttaacataaagggttcatattacacttgttatgatctagctttcttcttacacttaatactttctcttggagatctttccttgtccttacacacataccacacatactgacttccttctttttaattgttccataatatctcatagtgtggctgtaccatagtgaagtcattcttttttttttttttttttttttttttttttgagacagagtttcactctttttgctcaggctggagtacagtggcatgatctcggctcaccgcaacctccacctcctaggttcaagcgattctcttgcctcagcctcccaagtagctggcattacaggcacctgccaccgcgcctggctaatttttgtatttttagtagagatggggtttcaccatgttggccaggctggtctcaaactcctgacctcaggtgatctgcctgcctcggcctcccaaagtgctgggattacaggcgtgagccactgctcccggcctggagtcactttttaattaatgattcattctgttttttgttttttgttttttttctgttgaaaaccttactctaatgcacatccctgtatatcaagtttgtccaacctgcagcctgtgggccacatgcggcccaggacggctttgaatgcagcctaacacaaatttgtaaactttgtttaaacatttaagaatttttttgcgattttttttttttagctcatcagctatcgttagtgttagtgtatttttttaaatttatttttattatttatttatttatttattttttgagacgggtcttgcactgtcacccaggctggagtgcagtggcacagtctcggctcactgcaagctccaaactccgcctcccacgttaacgccattctcctgcctcagcctcccaagtagctaggactacaggtgcccaccaccacgcccggctaattttttttttgtatttttagtagagacggggtttcaccatgttagccaggatggtctcgatctcctgacctcgtgatccgcccgcctcggactcccaaagtgctgggattacaggcgtgagccactgctcccagccagtgttagtgtattttatctgtggcccaagacaattcttccatgtggcccagggaagccaaaagattggatacccctgctctatatgcttgctgaagcatgtgtggaagggtttcgctggtgtagctatcaagaagtgaaactgctaggtcggcaggggcacacctatattaagtacaaacggaagctgccaagttgccctgcagaatggctttgctgattgatacctccaggaattgctgtgagagtgttcatttccccacccttgctaagcctgagcattagggttgcctaattagttttgccaatctgatgggcaaaaaaatacctctgttgttttactttgtacctttctgattgctattgaagttgtgcctattttcatgttttttggccagtcaggtttacccatatgtgaattgtctgtatctatcttttccccgtttttctattgattcttcgttctttttctttttaattttttttttgagaattctttacctgttctgggtatcaatttttttgttaaatattgtaaatgtttttgttgtattattgtgtggtagttttcctgttaattgtaaatgtttctcctgttttctgttactatttgttttcactgttaatattttaattagtgataaatacaaagtaatattctaggtgacaaatctttttaaaaagtattttaaaataactttaccatttttggaaaccagggtttattatatttaaattttgagaattttttctggtgtcttatgtactaaattaatgtggtcaaaaaatatttactgggcccaactatgtgccacctctgctctgagcactgggaatataatgtttgattgtgcattttgcaagtaactgagagctaggaaaacagttatatgttttatttttttatttttattattattattattattttgagacagagtctctctctgtcgcccaggctggagtgcggtggcgcaatcttggctcactgcaagctctgcttcccaggttcacagcatactcctgcctcagcctcctgagtagctgggactacaggcgcccgccaccacgcctggctaattttttgtattttttttagtagagacagggtttcaccctgtcggccaggatggtctcgatctcttgacctcatgatctgctcacctcggcctcccaaagtgctgggattacaggcgtgacccaccgcgcctggcctgtttttttttttgttttttttgtttttttgagacagagtctctctcggtttcccaggctggagtgcagtgatgcgcgcttactgcaacctctgcctcctgagctcaagcgattctcctgcctcagccttctgagtagctgggattacaggcgcatgccaccacacctggctaatttttgtatttttagtagagacggggtttcaccatgttggtcaggcttgtttcgagctcctgaccttgtgatcctcccgcttcggtctcccaaagtgctaggatgacaggcatgagccacttcgtccagccaacagttctgttaaatacacataacatacaatggccaagttgtttgcgtttgtgtttgcgtttttgttttttcaatttttcaattttttttttttctttggaaatggggtcttgctctgtcacccaggctggagtgcagtggcgcagtctctgctcactgcaagctcctcctcccaggttcacaccattctcctgcctcagcctcctgagtagctgggactataggagcccaccaccacgcctggctaattttttttgtatttttagtagagacggggtttcaccgtgttagccaagatggtctcgatctcctgacctcgtgattcgcgtacctcggcgtcccaaagtgctgggattataggcgtgagccaccacgcccggccctgtttttcaattttttaataaaatcaagagagggtctcgctatgttgcccaggctggtcttgaacttctgggctcaagcaatcctcctgcctcagtctcccaaagtgctgggactacaggcatgaaccaccatacctggcctccaagtttgtttacatgaaaacagaatgactacttttttttttttaattgagacagagtctcgctctgtcgcccaggctggagtgcagtgacgcgatctcgtctcactgcaacctcaaccacttgggttcaagcgattcttgtgtctcagtctcctgagtagctgggactacaggcacgcaccaccacgcccagctaattcttttgcatttttagtagacagagttttgccatgttggccaagctggtcttgaactcctaacctgaagtaagccgcctgcctcggcctcccaaagtgctgggattacaggtgtgagccactgtgcctggccacatacttcttataaaactcttaaggtagccacattttttttccagtgaacgtggtttaaataaaatgtgagacactcccattactttaatggaatagagttatatcaactttttatttttatttatttgtttatttatttatttttgagacagagtctctctcactgtgttggccagattggagtgcatcggcatgatcacagcacaatcatagcttggtgcagcctcaacctcagccacccaagtagctgggaacaaaggtgcacgccaccatgcctggcttttttttttttttttttgcagagactaggtctcactatgttgcccaggctagtctgcaactcctgggctcaagcagtcctctcaccttggcctcccaaagtgttggggttataggcttgagccactgtgcctggcttgaattctttaatctatctaaagtttctttttgtgactattggtaagggggagattttttccaaataattagctagttgtttcaaacattttgaatagtttatccttattttactgataggaagtgccaactttcacaaacactaaatttgcttgtatctgtttccaggtactattttgttcctgtttagtaacttattttaacaattagaacttttgctatcctgtttggcaggagcctcctcttcgttctttttttttttttttttttttttttttgagacagagtctcactctgtcatccgggctggagtgcagtggcacaatttcaactcactgcaacctccccctcccagcttcaagcgattctcgtgcttcagcctcccaagtagctgggattacaggtatgcaccaccatcctggctaatttttatatttttggtagagacagggtcttgccatgttggtcaggctggtctcgaactcctgtcctcaagtgatccactcgccttggcctcccaaagtcctggggttacaggtgtgagccaccacgcatgcctgtctttgttctttttccatattgccttggctcttccttcaaatcttttctccttgactagctttagaatcacaagggttccagctccacccctgcttctttctttttttgtttgtttgttttttggagacggagtctcactctgtcacccaggctggagtgcaatggcatgatcccagcttgctgcaacctctgcttcccgggttcaagcaattctcctgcctcagccttccaagtagctgggattacaggcacatgccaccacgcccagctaattttgtatttttaatacagacagggttttaccatattggccaggcttatcttgaagtccccacctcaggtgatccacccacctcggcttcccaaagtgctgggattacaggcgcatgccaccatgcccagctaattttgtatttttagtagagacggggttttaccatgttggccaggctcatctcgaactcccccacctgaggtgatccacccacctcagcctcccaaagttctgggattacaggcgtgagccaccgcgtccggcctccctgcttctttatttagtccactgactccttgcctgaagcctctgctttctttggtgccaggccccactggcctggctcaccctctggtcctccatgccccctaacaggcaccgcatgcgtggggagaccaccctgtggaaccctggctgtgaccatgcaggtattgccacccaggtggtggtggagaagaagctatggcgtgagcagggactgagccggcaccagctgggccgcgaggcctttctacaggaagtctggaagtggaaggaggagtgagtatgcagcatccctgtgggcatcgcagccctgcctccctgtcccctatccagaagacctctgtcacctgtaaccccttggccacagggtcagaccctcccacagaggcagagtcagttggctctagggcccaggtaaatttcagggggatgggtgatctccacactgcccagtcagccacctgatgtctccctctagcccaggcacgagtgctgacctcagcctgtctgcttccaggaaaggtgaccggatttaccaccagttgaagaagcttggcagctccttggactgggatcgagcctgtttcaccatggaccctgtgcgtgggaggagtgtcaaagctggggcaggagtaggagtctccccagggtgggacccccacaggagaaagcagaggtgttgtggccctctctcaggagctggcccatgtaaaacaccatggagggctcagctgcaaatgccacttcccacccctcgccatggccctttccatatcatggcccttcatgttccctgtcttggctctgggagctccagattcctccagatggcacatgatcaggaccccgtctcccatggagcctgaactcccagtgtcctctgcaccagtacttgtccccagctgattgtcttcctcgccatctgcagcattacaaggcttgttgcctgctcttgtgttcccttagtcctctctccccctcaaggaaagaaggaaagtactcccctcagaggggtctttgtgctggccagtgggactctgtatgggcaaggcctcactggagccctgggtgtctgcctgggcctccaggcacaaggcccatctctctgacttctccctcctccaccccagaaactctcagcagctgtgacagaggcctttgtccggcttcacgaggaaggcatcatctatcgcagtacccgccttgttaactggtcctgcaccctcaactccgccatctctgacattgaggtgcgccccccaacctggcctgtctccatctccaatctaccctggccctggccctggcccctgggccacgcctctaaatacccattttacaggtggataagaaggagctgacaggtcgcaccctgctctccgtgcctggctacaaggagaaggtggagttcggggtcctcgtgtcctttgcctataaggtccaaggctcaggtaggagccaggggcaccaggatcctgggctgggagtggcaggaaggggccaaggccaagaccacaaggccttctgtcaccccagatagcgacgaggaggtggtggtggcaacaactcggatcgagacaatgctgggagatgtggctgtagctgtgcaccccaaagataccagataccaggtgggggactgtccacagttagggaaggagttctggccaaaaagggctcccatccttatggggtggaggggttggacttaggcccctggctgaggagaggaaactgggttagaaactggtcttcagcttctttcccagctctgagggtagagctattggggactgtttgggggagttcaagtgttgggatagtcagggccctggaaaggaaggacttgggcccagcccttcgtgcatttttaaaaagttaaatagccaggcacagtggctcatgcctgtaatcccagcgctttgggaggctgaggcaggtgaatcataaggtcacgagttcgagactagcctggccaacatagtgaaaccccatctctactaaaaatacaaaaaattagccagttgtagtggcgggtgcctgtaatctcagctactcaggaggctgaggcaggagaatcgcttgaacctgggatgcggaggttgcagtgagctgagatcactctgctgcactccagccttggtgacagagcgagactccgtctcaaaaaaaaaaaaaaaagttaaatagagacaaggtctcactctgttaaccatgctgatcttgaactcctggcctcaaggaagcctcctgccccagcctcccaaagtgtgggggttagagatgtgagccatggcaccaggccccttcatgcttttatttatttatttatttttgagagagggtctcactctatcgcccaggctagagtgcagtggcaccatcttggctcactgcaacctccacctcccgggttcaagcagtacttgtgcctcagcctcttgagtagctgagattacaggcacgcgtcaccacacctggctaattttttttttgtatttttagtagagactaggtttccccatgttggccaggctggtctccaactcccggcctcaagtgatctgcccacctcagcctcccaaagttctgggattacaggtgggaatcacggcgtctggccctgcttcatgcgtttttggtatctttccgcccccagcacctgaaggggaagaacgtgatccacccattcctgtctcggagccttcccattgtcttcgatgaatttgtggacatggactttggcacaggtgggcaaggggctggtcctgtggggagaggaaaagactggagctgcaccctagctgtccatcttctctcagagaaaaagaaaataagcttcagccaaatagacagagcttggggtggttctcaagggactgtattagacaagtgggggccaggagtggtctcggagctacatccttcagcaaaagaggtgagtgtaggaaggaactccgtggagtccctcatgacctgggcatcctgatgtacacccaggtgctgtgaagatcacccccgcacatgaccaaaatgactatgaagttgggcagcggcacgggctggaggccatcagcatcatggactcccggggggccctcatcaatgtgcctccgcctttcctggtgaggctgcctgaggcaagagtgcccgggtcagggagatggagggatggctgggcatcgccatgatgaggcctcattcctacccagggcctgcccaggtttgaggccaggaaagcggtgctggtggcgctgaaggagcggggactgttccgtggcattgaggacaaccccatggtggtgccactttgcaagtgagggtgggggcctgggacgggaggaagatggagggctcctcagggttttaccgcctggccttctcacctacgtgtacccccagccggtcgaaggacgtggtagagcctctgctgcggccgcagtggtacgttcgctgcggggagatggcccaggctgccagcgccgctgtgactcggggtgacctccgcatcctgcctgaggcccatcagcgcacatggcatgcctggatggacaacatccggtgtgtagggtcctcagtgtgggaggggcttgccgagggctgagcagggctcactcgggccaggctccatcaggccctccctgatttctcctccccgacatttgcagggagtggtgcatttccaggcagctgtggtggggccatcgcatcccagcctactttgtcactgtcagtgacccagcggtgccccctggggaggtgagcagagggccagagctagctgctgggacaccctgctggagtggtgggtttactgggtccttggtggggggaggggcagggtgagccagaagcagacacacccccttgggtaatcactgcacctgtggcaggaccctgatgggcggtactgggtgagtggacgcaatgaggcggaggcccgggagaaggcagccaaggagttcggagtgtcccctgacaagatcagtctccagcaaggcaaggcggggctttgagggtctggagggagttgtggggggcagagctccactccctctgacctctgacctttggcctctctcagatgaggatgtattggatacctggttctcctctggcctcttccccttatccattttgggctggcccaaccaggtgtgttcctggggccggggcttggcgggacaggggactggagggtgggtgttggctccccttcacaccctggtctgccctcagtcagaagacctgagtgtgttctaccccgggacactgctggagaccggtcatgacatcctcttcttctgggtggcccggatggtcatgctgggcctgaagctcacgggcaggctgccctttagagaggtgcggagacagccgagaccctcccatcgcccccagcctcctctcctaccgtcctgtgctgcagcgcagaccccgcgtggctggggcatggggttagctgtgggcaggcctgacccgggggctggtgtggggttgaaatccagcctgggccctgctcagtgattcctgtgcccagggcttcatcttcccagaggaaggagtgcttctgattcacataaaggcgctcaacgagctcttggggacactcagtgggacctgaggttcacagtggggtagaccagacacagtcctggtcggggcactgaggccggggaaggagaggactgagtctcatgggcctccccacctgctctgcaggtctacctccatgccatcgtgcgagatgctcacggccggaagatgagcaagtctctaggcaatgtcatcgatcccctggatgtcatctatggaatctccctgcaggtgggctgggtgctgggccagccaggaagggccgtggggctgtggtcacagccacctgactgctcccactccaccctcagggcctccacaaccagctgctgaacagcaacctggatcccagcgaggtggagaaggccaaagaagggcaggtatggagggttgggctgggctaagcaggagcacagcgtggatggggctggctgaggacgctcctccccctgcctcttccctgtagaaagctgacttcccagcggggattcctgaatgtggcaccgatgctctccggtttggattatgtgcctacatgtcccagggtatggcccccaaagcgtccctcccagccactccttcctccttctgtgaggcccatccctcttctccaccctgagcctctggtgggcatgggctgggaagagggtgatgaggactcacatctcacccccgacccaggtcgtgacatcaacctggatgtgaaccggatactgggttaccgccacttctgcaacaagctctggaatgccaccaagtttgcccttcgtggccttgggaagggttttgtgccctcacccacctcccaggtaagggcctggtgggcagcaaagctggcagcactcacacaggctgtacccctgtccggagcagcctccatgtagctggggggacagatagacacagagacagacagttaaagggaaagcccagcgcattgggggctggggcctgtcacttcttcccagatcctggcacataggtggttgctttggactcatcagactctggatgaagatttgcccatgactcctgcccccatggggttctggcaccctcccctggcccgccggctgatacaccctctctccccaagcccggaggccatgagagcctggtggaccgctggatccgcagccgcctgacagaggctgtgaggctcagcaatcaaggcttccaggcctacgacttcccggccgtcaccactgcccagtacagcttctggctctatgagctctgtgatgtctacttggtgagaaggagcacagcggggcaggggatggtgggggcaggtgggcagcagagccctgggctcagttttgccagagttggccttgagacctaagccaacccatccccttcccagtcctcacaggcacagcgagggctcaaggctagacctccagccgtgagccctgtacctctcgtcccctaggagtgcctgaaacctgtactgaatggggtggaccaggtggcagctgagtgtgcccgccagaccctgtacacttgcctggacgttggcctgcggctgctctcacccttcatgcccttcgtgacggaggagctgttccagaggctgccccggaggatgccgcaagctccccctagcctctgtgttaccccctacccggagccctcagaggtatggcatggcctggagaggggagtctgacctgccctccaggccccctcaccccctcctccaccccacagtgctcctggaaggaccccgaggcagaagccgcccttgagctggcgctaagcatcacgcgagccgtgcgctccctgcgggccgactacaacctcacccggatccggcctgactgtgagcctcaggcccccatgtccgccccatcccactgtcccctcagcctactctgggacccagtgtccggcagtgactgcttggtttcctgtctccatggagctaggcctcacctttctccctccctggcaggtttcctggaagtggcggatgaggccacgggcgccctggcatcggcggtgtcgggctacgtgcaggccctggccagcgcaggtgtggtggctgttctggccctgggggctcccgccccccagggttgcgctgtggctctggcttctgatcgctgctccatccacctgcagcttcaggggctggtggaccctgcacgggagctgggcaagctgcaagccaagcgagttgaggcccagcggcaggcccagcgtctgcgggaacgccgtgctgcctcgggctatcctgtcaaggtgccgctcgaagtccaggaggcagatgaagccaaggtgtgtggcctgggtgggcatttcccacaccatccccttcctccatcaaaaccctggtctgggctggtccgagtgcagtggtgttgacaactaattgatcgtaaccagttacagatttctttgttccttctccactcccactagccttaaaaaacaaaacagcctggctcagtggctcacacctgtaatcccagaaatttgggaggccaaggtgggtggatcacttgagcccaggggtttgagaccagccaacatggtgaaatcccatctctacaacaaaaatacaaaaattagctggccatagtggcacacacttggggtcccagctactcggggggctgaggtgggcggattgcttgagcctgggaggtcaagactgcagtgagccgagatcatgccactgcacttgagcctgggcaacagagagaagaccctgtctggaaaaaaaacaaaacaaaacaaaaaccaatcctggtctggaagctggactctgtacccaaccctggggaatccactggggagcatggagcccaggcgctttgagcagggaccatagaaggccctccccttacacatggggagcagctgggggctgggcacaacccagggtcacacaacaggtgggagacggaggctgacctagaaccaggcatcctatctcccagccagacccttcgtaccccacccagctgcccaaaatgtggaaacctgcatgcctggggctgggcttggggtccacatgtagtcggggagccctgggcctcccaccacttactttcaagcctactgggctgaccctggaaggccagtcttgtttgtcccctgcctcctgggttccgccagagagaagcagtggagtaaactgcacagacacagagaaaaccagtcatggaggccaagagctagagagccttgagtggacgtggttaatctcacttggttctcccaagagccctgggaggggggcaatatcatcatcatcatctgacaaatgaagtgaccggcctgggagactgtgctctcctgcttaggtggggacactgaatggggaacacgtaggctctgaggttcctttgttcttggggactcaccacttggtggaaaaaggcaagacccaagaggtggtggtggaagtgggggtgctggtgggaatgggtggggagccaggccagccaggttcacgcctcctctgagctactgacctcccatggtcctcgctcatcttcccaactttgttgtcctgggtgtttgggggtctcttcacttggacctgggtcctcacccaccccctggttccactccagctccaacagacagaagcagagctcaggaaggtggatgaggccatcgccctattccagaagatgctgtgatccaccacccagcttcacccctcacccccagcggctcaccatggggatggcagcaataaaatattttcccacaaaatcctcttgtcatctgtggtgggggcagagaggggagcagaggggctgggtgcctgaatccttgggggctgcagggtgggagtgaggccctggttctggagggcagaggggtgcgtctatctgggtctgtccctggcactgtgccaggcctgagtcacgctgcttactcccttcctcctccccagctctcactcacctccgcactgcagccaagggaggcccgccctggcgtgggctgctgcctgtggctttgggcaggcaggagcgaaagggccaggggttgcctgtcctcccccaccctgttgaggccttcctccccctctgctgagcctcggttaattataactctgacctaagtgccctgtgacgtcaagcccgggccagccctgcccaggagacccagcaaccaggtaggggagggcctgagaggactcaggcttcctgagcatggggagtgtttctgcggcagggctggggacgcagccagggactggggaggggggcgtgggggaggaaccttggacccctctcctggcaggtgtgtatgtccctaatggtccgatgaggccctcaggttgtctgggtgacagcgagagggtggggaagccaggctggagcagacacgacttttgaggtaaagcaggttcccatggagacccgcagagccggcctgccctggaatcgcggctgcttcctcctcccttgagagccttctgtctcccaggtccatgtctcagccatgctccccacggaggtcccccaatcccacccgggcccctcagcgttgcttctgctgcagctgttgctgccccccacatctgccttcttccccaacatctggagcctgctggctgcccctggctccatcacccaccaagacctaactgaggaggcagcgctcaacgtcaccctgcagctcttcctggagcagccacccccaggccgcccccctcttcgtcttgaggacttcctggtgagcatcccagggtcctgtcacacccctgccagagtccccaattccatggggcctctactccttgagggctctggttgccaagagaagagacacccatggccccacccctgcagcaataatacccagtagtcttggtcctgaaattaggagtccccctccttagaaaggtccgggactgtccctcctttgtggggctcaggaccctcatacccagccttgagtgtcagttgctgagataaggtgggcaacagtcaatccaaagggcctccctggagccccgtcgcccgctattctccccagggtcgaacactccttgctgatgacctctttgccgcctactttggacctggttcttctcggcggttccgagcagccttaggtgaggtgtctcgtgccaatgcagcccaggacttcctgccaacttccaggaatgaccccgacctgcactttgatgctgagcgactgggtcagggacgcgcgcgcctggtaggggctctgcgggagaccgtggtggcagccagggcccttgaccacaccctggctcgccagcgcctcggggctgcacttcatgccctgcaggtgagaacagggttgggttgatggtcagaggggtcttcacttccgtgcctgtccgggatggagcgcgtcctatggtgccttcttgatcatgtctcctccactctggaaggggtgggcactggcacgcggtgccccgaggctgtgtcccagttccccacctccaagctggcagtgcttcctgtaggaacagcaaggagggcgctgtggctggagagaagtgagggtgagagaggaaggctgcgaggtcagagagctgagggagcagcacacgcagcaggactctgcaggccgagagaggccttgggttagactctgagctgggaagagatgctgggacagtttccacctgggcaaagctctgctctgagcaatggagagagggcagtggaggggacttggggtgtctggtgggagcagtaggggtgggaggggactttcgggatggggaactcaaaggagtggcatattagtgctggagatggtgagaaaggccagactagtgcctcactccccttctcctgtcctccggaccaggatttctacagtcatagcaactgggtggagctgggcgagcagcagccacaccctcacctcctctggccaaggcaggagctccagaacctggcacaaggtatggctgtgaccctggtggtgaggcaggagtccacagggccacctcagtccacccagccactgtgtcacattctgaagtcccagagggtatgatgttacttaatctccacaaggactgaggtcccccagtccaagcaacgcctggctcagttaagcagcttccccaaggtcacacagggaaaagtagctaggaccaggtctccagacctcagtcccgtcttaagtgtggcttcctccccgcactgactcccatggggccttctctcacagccccctcaccctctcacctggaagctgcctcctgtccacaactcacagagggcataatccccataggattggtccctacacgtactgtgtttgtttttttcttattatttatttatgtatttattttttagagatgaggtctcactgtgtggcgcaggctgctctgcccgccttagcctcctaaagtgctgggattacagtcgtgagccaccgcacccagcctgtgctgtgttttccagcacagccccagtttcaaacattcaggctcactgcgggcccatgatcctaggttttagttcagaaagctttgctagggaacttctgggtgttcgcctcatcccagctgggaggagaagctgaaaaggtttgggtgggtggggataaaggctgggggtggcagaatcttgggttctagccctgccctctcttcccagtggccgatcctacctgctccgattgcgaggagttgagctgccccaggaattggctgggcttcacactcctcacctctggctactttggaactcatcccccgaaacctccaggtaccagacaagaaagttccccagaagtaaggggagaaagtcattcccttacaggatctctgtcctgtaggcccgtatgcctttgctatggcatctcctcctaggaggagaggatgctgggaacagggtgggtggaggaaagtcccctgaggaggctgtggtggggttgaggtaggggagcaacttcttcctccgctgataggatttctcccttgtcataggcagctttgggggactggctggagggatcaggggatccaccatgtgctgtggtgactgaccaccacgccctaagatttactccagaattcccctccacaaagcaccatcctttttatcctttttttttttttttttttttttgagatggagttttgttctttttgcccaggctggagtacagtggcacgatctcggctcactgcaacctccgcctcccaggttcaagcgattctcctgcctcagcctcccgagtagctgggattacgggcatgtgccaccacgcccggctaattttgtacttttagtagagacagggtttcatcatgttggccaggcttgtctcaaactcctgacttcaggtgatccacccacctcagcctcccaaaatgctgggattactggtgtgagccaccgtgcccagccatcatttatttatttatttattttttgagaccgagtcttgctctgccacccaggctggagtgcagtggcgtgatctcggttcactgcaacctccgcctcttgggatcaagctattttccttcctcagcctcctaagtagctgggattacaagcacgcgccaccacacctggctaatttttatagttttagtagaaacagagcttcaccatgttggccaggctggtcttgaactcctgatctcagatgatctgccggcctcggcctcccaaagcgctgggattccaggcgtgagccaccgcgccaaccccgtcatcatttcttgctgaacccttgctgaggggtgagagggtcaggccaggcctgaaagggcctcattttcttaggaggcagtgggtttttgacctccactctccagatccctttccccaacccagggaaatgtagccacgggggccattttgaccggagcagctcccagccaccgaggggaggcatcaacaaggacagcacatccccaggcttctcccctcaccacatgctgcacctccaggctgcaaaactggcccttctagcctccatccaggccttcagccttctgcgaagccgcctgggagacagggatttctccaggtgagtggcctcctggggatggaccccttcatggggaggcgctcctgcgggaagggagaaaccaggcgctggggacaaacgtgcaggcccttcactgtgtctctggcttgctccccaggctgctggacatcaccccagcctccagcctgagctttgtcctggacaccacgggcagcatgggtgaggagatcaacgctgccaaaatccaggctcgccaccttgtggagcagcggagaggcagccccatggagcctgtccactatgtcctggtgccttttcatgacccaggtaagtgtggtctggctaggacagtagaggggaggaaaattcaaggtaagggatagactgggcgtggtggctcacgcctgtaatcccagcactttgggaggctgaggcaggtggatcacctgaggtcgggagtttgagaccagcctgactaatatggagaaaccccgtctctactaaaaatacaaaattagccgggcgtggtggtgggcacctataatcccagctactcgggaggctgaggcaggagaatcgcttgaacccaggaggcagaggttgtggtgagccccgagatcgtgcctttgcactccagcctgggcaacaagagcaaaaagctctgtcacaaaaaaaaaaaaaaaaaaaaaaaaaaaaaagaaaagaaagaaaaaaaaaagaaaagataaaaaggtaagggataaaggcctgtggtgaggaagtgggctcggggtggcacttcctgtagtcccgagtgagcctctactgtgtgcatacagaaaattagcagcaacctgggtggggtggctcacacctgtaatcccagcactttgggaggcagaggtgggtggatcgtttgagcccaggatttcaagaccaacctgggcaacacagagaaacacaggtctctacaaaaaaattaataaaaattatgtgtgggtgtggtggcacatgcctatagtcccagctacttgggaagctgaggcaggaggatcacttgagcccaggagactgaggctgcagtgagccgtgatggcactactgcactccagagcggcctgggtgacgcagtgagaccctgtctctaaaaaaaaaaaaaaagataactagcagacttgcctcccactctttctaaaatggcagcactttccatgagtttaatgcatgattcatgctttggcacgtggcctctgctttcttaggctttcatgctaataaaccattttctttttttttttttttttttttttttgagacggagtctcgctctgtcgcccaggctggagtgccatggcgcgatctcggctcactacaagctccgtctcccgggttcacgccattctcctgtctcagcctcctgagtagctgggactacaggcgcccgccaccacgcccggctaatttttgtatttttagtagagacggagtttcaccgtgttaaccaggatggtctccatctcctgacctcgtgatccgcccgcctcggcctcccaaagtgctgggattacaggtgtgagccaccgtgcccggccgccattttcaattctctccatttcctatagacagagattggtatcaagatggggttgttggggccaggcttctgggaagcatctgagataactagctacattgtattccttttccattgattagaagttagactctctggcttgagtctgactgtgtgtctttaggctggtcatgtaaactttctttgcctcgatttcatcatctgtaaaatgggtatcagttatcacatcagggtggggcaggatgttggaatgtcatcagttaaggctattttcacttcttttgtggatcttcagttgcttcaggccatctggatgtataagtgccagtcacaggggatatgattggttagcttgggctcagaggcctgacacctccctcatcctgcctaactcccagagttgaaatgatgatcaaataaaatgcctactggactgagagttgcctaaatttgagtcttatttgcctgcatacatcctacagtggctggcatttaatagacttattatgtttgatgaagatataaataaaggtataactaagaacttagcacttatgtgtcaaagcactatcttaagatttgcaaaatcaactcatttagtcctcccaataaacctctgaggtaagtgctattcggtctcttttcttatgaggaaacccagtttttttttttcttttctttttttttttttttttttgagagagagagagggagagtctcactctgtcacccaggttggagtgcaatggtacaatcatgcctcactgcagcctcgattcaagcaatcctcctgccacagcctcctgagtagctgggactacagatgagcaccaccatatctggctaatttttgtatttttttgtagagatggggtctcactatgttacccaggctgatctcgagctcctgggctcaagtgatcctcccacttcagcctctcaaagtgctgggataataggtgtgaccatttttttttttatatacgcacatgtagccaataaaggcctacaggaaatgccaccatttttttcagggagtggaggccaccttcccaccagggacacctaggtctgccctgccctgccccgccctgccccgccctgcactgacaagtatgactttttttttttttttttgagatagagtctgtcgccagactggagtgcagcggcacgatctcggctcactgcaacctctgcctcccgggttcaagtgattctcctgcctcagcctccccagtagctggggaggctactggggagcctctggggaggctactggggaggctacgggcatgcatcaccatgcccagctaatttttatattttttagtagagacgaggtttcaccatgttggccaggatggttttgatctcttgacctcatgatccacccaccttggcctcccaaaatgctgggattacaggtgtgagccaccgcacccggccaagtatgagtcttataatggagtattgttatttcaatacctgtcggctccagaagcacaccaggcccctcaactggggaggtggctctgggtaagaatgaggggagctctttcctcacttatcttaacctcctttccccttcccagggttcggccctgtctttacaaccagtgaccctgacagcttctggcaacagcttaatgagatccatgccttggggggtggagacgagcctgagatgtgcctgtcagccctgcaggtctggcccctcccttcttccccgtttcctggccccaccaccagggggagctagatccctcctggggctccccaccaccttcagcacctagatccactagcttcactgtagggttcccgggccatattcccttctgcttcatcctccgtggctctacccattcccctcctactgccattgttaacactggtcgttgccttccctgccagctggccctgctgcacacacctccactctcagatatctttgtcttcacggatgcctcccccaaggatgcctttctcaccaaccaggtggaatccctgactcaggagcggcgctgccgggtgagcagagctagtgggagacccagtgttagcctcccagggatgtgagagaccctgtgatgacaatctcataacgagggttgcaccacactatggtggcccaacaagccttggtatatggtgggagaagcagacaatgagtggaacatttcctgatacctttaatgatatacgtaagaggccctacccttaataacgctgaatttttatttgaccctgcctaataaacaatgtgaagaactggggctctagtcgccaaaaatccactgtgacagttacaagggggtggccaactactaactgaaggcagggggttctgtcattgggattccccaccccagcagccagaaggcaggcagagaccttatcacaaaccatcagctctggagaaagcttgagcacagggattctcattcataatagtggatggcacttggacaccccaatcactgagctctcttctgggtacaggtaacattcctggtgactgaagatacatcaagggttcagggtcgagctcggcgtgagatcttgtcccctctgcgttttgagccatacaaagcagtggccctggcctcaggaggagaggtgatcttcaccaaagaccagcacattcgagacgtggcagccattgttggggagagcatggctgccctggtaagtgggggccagggccctcacttaggaactgaagggtggtcaggctgcacctctcttcttataggagaaaggggaatcactctcactgctgtgttgttcttccagtcacggggcaggaaaggaagtttctcttcctcttagatccatgactagccacttctttttttttttttgagatggagtcttatggtcacccaggttggagtgcagtggcacaatcttggctcattgcaacctccacctcccgggttcaagggattctcctgcctcagcctcccaagtcgctagagttaccagtgcccaccaccaggcctggctaatttttgtatttttttagtagagccggggtttcaccgtttttttggccaggctggtttcgtactcctgaccgcaagtgatccgcctaccttggcctcccacagtgctgggattacaggcgcgagccaccacgcctggcctgcattgtccttttatatcagtaaacctctccccacttggcttccagtattctgcctccagggttaccacaggaagtcctaccatctttttggggaggtggcttgtattttgcagagacagagtcttgctatattgactaagctgttcttgaacccctggcctcaagtgatcctcctgccttggtctcccaggtgctgggattacagacatgagccaccacgcctggcctatcatcttttaatggggcacaagatgtgattgtctcatcctgaatcccttgcctccaactttgtctctgaccataataacttcatccctggccccgtgcccctctcttactggtatccctttctgcctgtttgacgtggtttctttcttttttctttttctttctttttttttttttttttttttttgagacagagtcttgcactgtcgcccaggctggagtgcaatggtacaatcttggctcactgcagcctctgcctgttgggttcaagcgattctcctgctccagcctcccaagtagctgggattacaggagcccaccaccacacctggctaattttttgtatttttttttttttagtagagatgtagtttcactgtgttggccaggctggtctcgaactcttgaccttgtgatccacccgcctcagcctcccaaagtgctgggattacaggcgtgaccaactgcgcccagcccaatgacgtggtttctttctatctcccctttcttctttgttcctcatcccatacctcatcttcttccccattttctggtcctgccaatccctcaaggtgactcttcccctggaccctcctgttgtggtgcctgggcagccacttgtgttcagcgtggatgggctgctccagaagatcacagtccggatccacggagacatcagcagcttctggatcaagaaccctgcaggtacctctgaaggtagagggaagagaggggaccggggaatagacaatcgaggggatgtactcaaggagagcaagtgcttcatgtgacaatctcttccctgaccccaggggtctcccagggccaggaggaaggcgggggtcctctaggtcacactcgccgctttgggcagttctggatggtgaccatggatgaccctccacagacaggaacctgggagatccaggtcacagctgaggacacccctggggtgagagtgcaaggtaaggagggaggtgttcctgggaaggggaagcagagactgcaggcctcagagaacacgatcagtcacattcctttcaggaagggctctgactgcctttgccctttcccagcccagacctccctggacttcctcttccactttgggatccccatggaggatggaccccaccctggcctctaccccctgactcagccagttgcaggtacatttattccctgagcccccacccacctaacccccagttttttatatatatataaaatatataatatataatatatatattatatatataatgtatatatgtatacatacatctgtgcatatgcataacttttatattgagttataatttacataatgtgcactaaagtgtacagtttgatggatttcatataatacacccagttcaggatatagaacatttccagcaccccagaactccctcctgatgctccccatcaatacccctcgaaggtaacctattttcccatccatactccccagagggaacccctattttgaaggccattaattcttttctccctgtgtctccgaatctcacaatgttctcccctcctcgcccctgtcccaggtcttcagacccagctgctggtagaagtgacagggttgggttccagagccaatcctggggatcctcagccgcatttctcccacgtcatccttcgaggggtcccagagggtgccgaactaggccaggtgcccttggagcccgtgggacctccggagcgaggtctcctcgcagcctcgctgtcgcccacgctgctgtccacccctagacccttctccctggagctgattggccaggacgcagcggggcggcgcctgcacagggctgcccctcagcctagcactgtagtccctgtccttctggaggtgagacgccaggggaaagtgcggctggggctggagagagttagagcggccccttccctgaagaacccttctctgcagcttagtggcccctcgggtttcttggccccgggcagcaaagtcccgctcagtctccgcatcgccagcttctcgggccctcaggatcttgaccttaggactttcgtcaaccccagcttctccctcacctccaacctctccaggtgaggctcatgaaccctccagctccctctggcatcttgcccggccaatgcttatcccaagccctgcccctgtccccctccgactggccctcagaatcctcctctccgctcccgtgcccctgcaggcgtcccgactctaggctctgggcagcctggagctttagcgacgcctatatcctctctccagggctcacctggaactgaatgagtcggcctggggccgcctgtggctggaggtcccagattcagcggccccggattccgtggtgatggtgactgtgactgcagggggacgagaagccaacccagtacccccgactcatgctttcctccggctcctggtatcggccccagccccgcaggtgaggaactactactttccatcacagggtgggcaaggccggggagggtggtgtaggtttaatttgagtacagctctagcacaccctgtcattctcttccttttccccacaggaccggcacaccacccctaccggctcatctgacccgatcctcaccacggccacccctgccttttcccccttcacattggtgactcaaggcagggctggggcagggctggctgcgggcagcccctggtggggcacagttggaggggtgctgcttctgctaggcctggcctcctggtgacacaacgggctctaaagggatgggtctccagcactattttcaacctgccccattggtaagaagacctgggacacatttgtcacataggtcttaggaccttacctctcctagctgggatgaaggttttctcttttttgttgttgttgttttttttttgagatgtagttttgctcattgcccaggctggagtgcagcggcgcaatctcggctcgctgcaacctctgcctcctaggttcaagcgattctcctgcctcagcctcccaagtagctgggatcacaggtgcccgccaccacgcccggctaattttttgtatttttagtagagacagggtttcactatgttggccaggctggtctcaaactcctgacctcaggtgatctgcctgcctcggcctcccaaagtgctgggattacaggcgtgagccaccgtgcccagccaatgaaggttttctttctccatcacatccctttcctttcttagaaacttcgagactggggctgggtgcagtgctcacgcctgtaatcccagcactctgggaggctgaggcaggaggatcacttgagcccaggaggttgaggctgcagtgagttgtggtcgaaccactgcactacagcctgagcgacagtgagaccctatctcagaaacaaaacaaaacaaaacaccctgcaagactgggatagagggcaatggatattcccacaatgcacttttcctaaccctatgagaaacaaaccaaagacatttttggagaaagctgctttctggagcagtttcagttttatttttgtatttaaggctgaaggacagtttcaataaacatgtcttcttcccagagggatttcaaagaaagatcgtttttgcatgtcatataggggagaatgaggacatgagacaccaagaagatgaagttttcaggagcagaggagaaactttacaccaacatgtctgaacttcattgactcactacctggagccattttttagctgttgagttaagaaacagaaaaaggagcctggggcttctgactctttcaccaggcttaggggagtgagaggagggtttagacacgggtagggcctcttggccccttggtgcagccccgctgagccatctcctcctttggctgggtgactcctttctgctgccttgacaactcctggaggagaaacagatggggcctctgggctcctcccagccctgtagggtggggctcctgccctccttcttgaagtttacctgttgctgccacaagttctgctcccttcgtctttcctttgaatcctgggtggtgcaggaactagccttgttcagtggacttggggagaactggaggggaaattcgctgtgttttctgttaagccagcactgaccccaacaactcccctctctagtccaacttcccaaaagtctaaactgaaaacaataaactcaccttctcatgaatcagattctgcaaacagatgttcaccttttgaatctgggctaacggggggcgaccaggctctgagtgtaaatctgttagaaaattctagaggaggagttggaggctgacaacatggtgaaaacctgaggtcgtctgccactctattcctgtcaccacaggccatccctctcatctggatcccctcgtcccagtaccctcccaggcaggtgggaaaatccagtactctccacctccatctctttagcacatcagttcctccatctccctcaaatagcacaataccccctttcactactcttcatggagcctccctgtccatccctgccccattggaataatccaggccacaccctcatctccatggagtgatccaaatccctctgaatggaatgcagaccagcttcctccagccccaacaatgaacaccaacttaacacttggtggcatcctgtcattacgatgctgcctccaactcatgatccctgaccattaactctcccctctccagagtggtctcaggctgtgtctacacattccctgttcctccctccctggtcctccccccattcacacagaggggcagcccccatacctcaccaagggcccctagatgcagctgctgtcgctgtgcctccctcagatggtcttcaaaccaggcctggccatgctgtagcagctccagaccctgccacagggcatcctgttctctctccagagcctgcatcctgcgtagctgggaaaggcaatcacagaggctgactctcacgccacagtagggctctgggttatggccctttctctccacccctagttgggttcactgtgtggtcactgagtgtgaacccagactggccactgaggacctggagggcaaggggaggcaggcgggaacactgtgggccctcaagttcaatggaaatataaagggcagatctattgagagagttcccctgggacctcttgttgggctgatactcacccaaaggaagaagctctgggcccctgggtcttggcggcttgtccccagcggcagcagcaggactgtgtagggagcctgcaccaagggcaccccgccagagccctggctccccatggctctgaggtgggaagggtggagccactcccactggtgcagcccgggctggtccctcccctccacccctgccttgcacccatcctgcctctgtcagcctctcaggccccttcctgctgtgtctgtctgaggctggggtgttcctacttgagaagagagaccatctcccttggacccctctgtcttccctctaatctgttttgtagggcctctctgaaggggttcgttctcatgaagtatcctggggtagaatccgggagtcttcctacagcaacaacactgtatttttactgaggcagggcaggttcccctgtggactcctgctctgtgttttggatctttcctagtctcttgttttgagactaaagaaacaatatctttcttcaaaataaactttattcctaatatgaaacaaaatttctagagaaactaaaaactctgcgtctgagggagataaggaaacaaagagggcatggcagcccaccggagtctcaggaggctggggaggacactggaaggactctcagaggatgctggtggcagcaggcagcacttcctggctcatgaaaacgttcaagtccaggttaggatcttccaaatccagtttcataaacttatccactaatgtctggcaactgaagaagagagaaaatcgcaagatttatggcagaatggacaaccaaatccctgggcagaggggagaggctgtggcacagaaaacctgggatcttgaagatttagggatttcagaaagaaatggtgggtttctgaagggcaaagtgctggaggaaggctgagtccctgaaaaggggagaagagttgcaggagaagatgcagagagggtaaagacactggggccatatacgcacttttccatttggttcttctttagcaaatccttgacaggcttgatgggttttccactgcggatcaagtctgagacctaggaacaagcaagaaggtgggaggagtaaggggagtggggaagagaaggggaaataagggtcagaaatcctgtggacctagacccaggcccagtaggactaggaatgaaagggagctctgatgtggaggtggttgcacatttggatctcatcacctccttgccacgagccacaagcttgtcaggaagcccagcctgggcagctgtgtgggaggcatggctggccttcgcaacaccttcgcaaacctgatagaagaagacaagatcgttgccatcctcacaggtctccatggtcttaaaagagaataaaagacagtgtatcatcaatcacctccttcctgtcctgaaacccttggccaatcctgtggggagggagaaaagggaagggatgtggtctctgtgctgagggagcccttgttctgatagaggagccaatccccacctctgggaaatgcccagcctgggggtccccgaggagctagattggtctcctcaccaaatactgcaccaggggcccttgtggcagcagctgtagctgaacaaggctcagaaagttggtggccacaaagatgtgggggcatgtgggtccacgtgccagccagtgtcggagcacagcggccagaagcgcgagcccatccacctgcaaagagggcagaggttagcattcggagccatggggaccccatatgcccctctgcacttgcactgcctttccctgtctcgtgttctatttcttttctgcccacacagccctattccattccagaggcccagcctcactgtcatgctccttcatcctcctccattttcccctccttagtttctcccctcatcagtttctcccctcaccgtgttggttccctttccaaattcatcaataaggaccagcgactgtgcagtggcattgttcactgctttcgccacctgctgggtataaggtggacaagggaaagttagtattggaagcccgtaacgcactgaccacagttggcctgtgaataaagctgtatacatgccctccctactgcactgcaagttcttgaatggtgaggtgcacgctttgttcatcctctttgccaacagtgactcacatgaaacaagggttcaagaaatgtttatggtattgattcttcttatctctgaccttagtgctccccacttttagtataaagggcatgcagcagagggcatgctttcctgttatgagcattttcaggggttcctttcccattatccccttcctcaatcccacctccctttgttccctttgacctggttgaggtcgatcatgaaggtggagaggccaagggagatggattcgcagctatgaattcgtgtgaagatggcgtctactgccccaatttcggcctcctctgctggcacaaagctgcctaccagggccatgaatgtgatcaagcctacctgaatagggaaggagacagggcctggggcctggtgccgtgggctgaggtgaaagtgaggctcaaggcatgaatggcacatcaaagagaaatggacagggtgaaacaggagaaataggtaacagacacactgactctgtctctcctccccgaatcctgaccatagccctgtgggctaatttagaatcagtgaagaggcacgggacgtgggcagagacatacttgggagtggtgtgtacctactcagaggcaggtgaaggaatttgggccacggaaagttccattagagcatggctctccagtggagaataagaacatgtgaggtggaagcacagggatgtgggtgatggtcctttcatgaagagcggggtcagaaaatgggagaagagctgcaggagcctgagttggctggcaagtaggggtggagtagatgcaggagacgccagaggcccaggctgcagggcttctcctcacctgtttgaggtatatgctcttccctgatgagttgggtccagtgatgactttgaccctccctttgtccccaccacattctgtggagttgggcacaaaggttcgggcacagagttccatcagaggatgtctgcagtgggcggagaggcacctcgcatggcttgtggatcaagatagatgaacccccagaagatgtagcctttgggcccctcatgtctattcctccacccgcctctattcttacctgccattctggattcgtaccccaaggacttgtggggagtaacgcggccttgagtagccatagtcccgggcagcactggcaagagccagcaggacgtccaggcgggaggcaaggtccaatactcgggttaagacagctgctcgtgccagcacctggcactgtagctggtacatcagcagcgtctcctggtctgggagtgggtgaggaagggagctggaggtcagttccaggggaaagtgaaggagaggcagaggcccctagggggatctggaaacaggttgcagatacaatctgagacctcaagacattcagaggaaaagatagagtcagagtgagcgagacagagagcaggaagaggaggggcctgttggaagcatccccaagttgcccactcccctccttcccctggctgctgctttttttaaacatcttacaatgcatataacctctggcttttcctcaccccggatctcgcagtgcaggtcccccagcaatgcatccagctccttggttcgggcactacgatagtgcagcttctcctctgagagaaactgggtacaggggttcaaagctgtggactttgcatctcttggtcctcctctccttccccatctttctaaccccacctccagcccctaactctgacttctctttcctttgtctcagtgctggtaaagctcagagtaaaactacagaggagagatcccatattgggcagtgctgctgtagagtaacgctcttcctcagctgctgactcattttcctcatcactcaccttacagaggttgagggtcttaccatgaagtccagtccattaatctcaaagtcactggcctctaccatggaaggcaggcggggaatagaaagaaggaagccaatctggggagagtaaagaggagatactctactctcctgcttggagacttactggacacctccccaccctagagggagcttaaaagatccctgtatccccacaaaaaagtgttcatgttcttcaggctgccccacaagttttcttatctaccagtatgtctttcataagcctaatatctcccccaaaagacatctgaaggctacacccactctcctgccctcaccagagggatgtagatgacactgcatgaaggaatacgggagtccagattctccagctccttgcgggcaacctcagtaaggaaactgggaagtcccatcagtcttcgcttttctacgagggtggaagacacgtggttatcaaaagtgagtctcctgccctggttgctatgaagatccccagctgtggtgaccacctgccaaggatggtactccatcactgcgcagggctcacaggcccatccacacccaacactcactctcatcaatttcaggatctatgttggggaggactgtgaagcgattttcagcaaggctgccctcaaagtccacctgaggagataagtactgtttcttaggacctggcaccctctgtcctgttcctcagctctccttgggccccaattctccctgcagtcctcctttaactctcaccctccagatacttccctgaagttctgctgcctcctcccaccatcccattctttatccaattgacctcaatatcttccatgtttccccatcttgcacactgcattctctctccctgacctccctgggtgcactccctttttccttctactcactactttcccaatgaggctggcgatatggtgcaggtcatcagagaactcttgggcaatgtcccgaaagagctggatggactgcggcagggagcggcaggcatccctcaggcccagggcactgtacacagtctgtgagagaaacacaaaaaggaggacaggccacatccagctcgggttgaggtggtgatagggacagactcagaagaacaaagaccagtagggaagatcacagtaacaaagagggaagatctcaaaggcaaaaagaaacagtgagaggcactgtaccaaacactgaaactacaaagacaattaagatatggtcctggccaggcacagtggctcatgcctgtaatcccagcactttgggaggctgaggtgggtagatcacctgaggtcaggagttcgagatcagcctcaccaacatggtgaaaccctgtctctactcaaaatacaaaaaattaactgggcttggtggcatgcacatgtaattccagctacttgggaggctgaggcaggagaatctcttgaacccgggaggtggaggttatagccagatcacgccattgcactccagcctggccgacagagcgagactctgtctcaaaacaaaacaaataaacaaaaaaagatatggtccctgtcccagatgtgctcacagtctaggaaggaagacagaaatacatgcagaagatttaaaagtgaggtggtaggtgctttgatagagggttgtgcaaactctaaaacaaaggagtttgtacagagtcgggagaaagagaaatatagctataaaaggccatgagtctgtaatgatacaagaagaacaatgacaaaaaaacctcatcggctatcagggccgggcgcggtggctcacacctgtaatcccagcactttgggaggctgaggcgggtggatcacgaggtcaggagattgagaccatcctggttaagagggtgaaaccctgtctctactaaaagtacaaaaaattagccaggcgtggtggcgggcgcctgtagtcccaggcactcaggaggctgaggtaggagaatggcgcgaacccgggaggcagagcttgcagtgagccgagatcgcgccactgcactcctgcctgggcaacagtgcaagactccatctcaaacaaacaaacaaacaaacaaacaaaaaacaaaaaaatctcatggctatcttggagaatgttagggaactaatttaccatattgatagctagtaaataaaggtggggggtgctcatttctgcagcacatatactgaaatttcgaaggttacagggattagcacggccactgggcacggatgacacaaattcaagaagcgttccatattggggaaaaaaaaaagggctgggcatggtggctcacacctgtaatcccagcactttgggaggccgaggcgggtggatcacgaggtcaagagatcaagaccatcctggccatcatggtgaaaccctgtctctactaaaaatacaaaaattagccaggcatggtggcacacgcctatagtcccagctactcgggaggctgaggcaggagaatcacttgaaacccaacccgggaggtggaggttgcagtgagccaagattgtgccactgcactccagcctggtgacagagcaagactctgtctcaaaaaaaaaagagtgggggaaatatcaagcaattttctgtatttctatatgatttctatcacttggcaaccaaatagtacataaaaggaagtttctctttacagaaatttctggctaataaatgaagaaagaatcagagatttaaatgctactactttgtaattgctaaagaattaatagatggctgggtgtagtggttcacgcctgtaatgccagcactttgggaggctgaggcgggtggatcacctgaggtcaagagatcaagaccatcctggccaacatggtgaaatcccgtctctactaaaaatacaaaaattagctgggcgtggtggtgtgcgcctgtaagtcccagctactcaggaggctgaggcaggagaatcacttgaactcaggaggcggaggttgcagtgagccaagatcgtgccactgcacttcagcctggcgacagagggagactcacctcaaactaaataaataaataaataaatgaataatagatttaggtattaaacatcagaacatttgccaacatcagaaaaagagagacaatcggacatatcagacattatgttcctctacttctaaaacagtattgaaaaaaaaaaaactctgaacctaatcatgcttctagaactaaatattaatttacagaaactatagaagagagagaaatgtgccaaaaacatctaggaaatgcaaacagcaaaatccaggctaatggaaaacactataagacaaataataatctagtttcttcaacaaattgccaggagaagaaaaagagaaaaagaaagaaagaacaagagagaaaagatagagaaggaaccggtagattaaaaaggactagggccatcatctgactgggcatcgtggctcacaccaatagtctcagcactttgggaggcccaagcaggaggatcacttgagctcaggagtttgagaccaccttgagcaacatagtgagatcctgtctctacaaaaaataaaaaattggtcaggtgcaatggctcacgcctgtaatcccagcactttgggaggccgaggcaggcagatcatctgaggtcgggagttcgagaccagcccgaccaacagggagaaaccctgtctctactaaaaatacaaaattagctgggcgtggtggcacgcacctgtaatcccagctacttgggaggctgaggcaagagaatcacttgaacccaggaggtggaggttgcggtgagccgagatcacaccattgcactccagcctgggctacaagagcaaaatcccgtctcaaaaataaataaataaataaataaataaataaataaatgcaagcaaaaaataaaaacttagttcggtgtgatggccatcacctgtggtccctgctactcaggaggctgaggggggaggatcgcttgagcccaacagtttgaggctgcagtgagctacaattgtgccattgcactcaagcctgggtgacagagtgagaccctgtctcaaaaaagaaaaatttcagatatttgatgataccaaataatacaatttttaaagtaagataacaatactgttattctttttaaaaaataattttcttttagaaattaccctgaaatattggccgggtgaggtggctcacgcctgtaatcccagcactctgggaggccgaggcgggtggatcacgaggtcaggagatcaagaccatcctggccaacatggtgaaaccctgtctctactaaaaatacaaaaaaaaaacttgggcatggtggcatgtgcctgttatcccagctacatgggaggctgaggcaggagaatcgcttgaacctgggaggcggaggttgcagtgagccgagatcatgccactgcactccagcctggtgacagagtgagactccatctcaaaaaaaaaaaaaaaaagaaaaaagaaattacactgaaatatttatggatgaaatgatataatggctgggacttgcttcaaaataatccaagaaagccaggtgcagcatctcaggcttatagtcccagttactctggaggctaaggtgggaggattgcttgagcccagaagttagaggctgcaatgaaatatgactgcaccactctgctctagtatgggtgacaaagcaggaccttatttaaaaaaacaaacaaacgacaacaaaacccacaaaataatccaagaggggaaagtagaaaaagatatagatgacacatactaggctgggcacggtggctcccacctataatcctagcactttgggaggccgagatgggcagatcacttgaggccaggaatttgagaccagcctggccaacatggtgaaatcccatctctactaaaaatacaaaaatcactccagtgtggtggtgggcacctgtaatcccagctatttgggaggctgaggtaggagaatcacttgaacttgggaggcagaggttgcagtgagccgagatcgcaccactgcaatccagcctgggcgacagagcaagactctgtctaaaaaaaaaaagaaaaagaaataaaaaaaaaattggcgtaagttaaagtgttgaaactgcatggtgggtacatgggggttaattatattattctaaatattttttacattttcctgaatacaaagttaaaaaaaaaaagagggaggccgggcctggtggttcacacctgtaatcccagcaccttgggaggctgaggcaggtggatcacctgaagtcaggagttcaagaccagcctggccaacatggtgaaatcctgtctctactaaaaatacaaaaatttgccaggcatggtggcgggcgcttgtaatcccaacttctcgggaggctgaggcagaattgcttgaacccaggaggcggaggttgcagtgagccaagatcgccccatggcacttcagcctgggcgacagagcgaggctgtctccaaaaaaaaaaaaaagagggtagaataaaattggacagcatgtctagggtacagacagtctggaatacaggctgagggcctttacctggacttttgggattcaagaaggaaggccttaccttgtagagaacctgccagtcgctgaccttggtgtgggacaacttcatgcgtttcagaatcagctacagtcagacaaggttacagccgctgttttctcttccctcactctaatgcccctcaagaagcccactgcccagtatcagccctcaacctccttccccacctccctgccctccaccctgggctcacaggcacgttcttgatgtgacccaggagccgatgcagcatctgagccatgtccagattctggggcagcagaaaaaactgaatgacgtccagacgagaactgagctcccccaggtcatgagtcggacgtgtgaaccatagcctggaagtgagggtttgggtgggggtactacaagttacatctatcatcttgatctcagtttgccaaaaagtgtgcttgcagtccctggggattgtggcaatatgtatccacgatgtgctatgggaatgtagtggcaagtgcagtgtcctacccattcaggtgtgtttacatgtatctactgaaaattgctagatgtgagcataattgtgtctacatatcacagtttcaacggataagaccgtgtgtcattccatgtatataagtaacggagcttgtcaatattttagaaggagagcagtgtgttgaggtatttgtgtgccaacactgcagctcactctgaggctgagtaagagacggtgagtcagtatgagtttgtatgtctttttagctgtgaaagtgtctctgggtaacagcaacagacattcatcttttcatattcttcctgtgaaaacataactgtcccattagggatgataagctttaattcataataatggtcaacactgcagagaaaaaaggattggggagggacatttaaggggcttcaacaacaatgtcttattctttcgtttttttttttttttgagacagagtctcgctttgtcgccaggctggagtgcagtgatgcgatctcggctcactgcaacctccacctcccgggttcaagtgattttcgtgcctcagcctcccgagtagctgggactgcaggtatgcgccaccatgcccagctaattgttgtatttttagtagagtcagggtttcactatgttggccagaatgatctcgatctcttgacctcgtgatctgcccgcctcggctcccaaagtgctgggattacaggcgtgagtcaccatacccggccaatagtgtcttattctttttttttattttattttttatatagagtcttgctctgtcgcccaggctagagtgcagtagcacaatcttggcttactgcaacctccacctcccaggttctggaattacaggcacccgccactgtgctcagctaatttttgtatttttagtagagacggggtttcaccatcttggccaggctggtcttgaactcctgaccttgtgatccacccgcctcggcctcccaaagtgctgggattacaggcatgagccaccgcgcccggcatgtcttattcttaaattggctgatggatatatagatatttgtattattattattatttttgagatggagtcttgctctgtcgcccaggctagggtacagtggcgggatctcgggtcactgcaacctctgcctcacaggcttaagtgattctcctgcctcagcctccccagcagctggaactacaggtgtgtgccaccatgcccagctaaattttgtatttttagtagagatagggtttcgctgtgttggccaggctggtctcaaaatcgtgacctcaggtgatctgcctgcctcagcctcctaaagtgctggaattacaggcatgagctactgcgcctggccatttgtattactattaatagtttttatagagacgaggtcttgctatgttgcccaggctgttctcaagctcctggcctcaagcagtcctcctgccatggcctcccaaagtgctgggattacaagcataagccactgcacctggcccgatagtattattatttacatctttttttttttttctgagacagagtcttgctctgttgtccaggctggagtgcagtggtgcgatctcagctcactgcaacctccgcctcccaggttcaagcgattctcgtgtctcagcctctggagtagctgggattacaggggtgcaccaccactcccggctaatttttgtatttttagtagagatgaggtttcaccatgttggccagcctggtctcaaactccggacctctggtgttccacctgcctcggcctcccaaagtgctgggattacagtcatgagccaccacgcccggctaattatttacatctttttgtgtgttggaggtatttcctaataaatgaaaataaattcaggccaggtgcggtggctcacgcctgtaatcccagcactttggcaggccaaggagggcgggtcacgaggtcaggagatcaagaccatcctggctaacgcggtgaaaccccgtctctactaaaaacacaacaaaattagccgggcgtgttggcgggcacctatagtcccagctactcgggagggtgaggcagaatggtgtaaacccgggaggtggagcttgcaatgagccaggccactgcactccaggatgggtgacagagtgagactctgtctcaaaaaataaataaataaataaaataaattcatatacagaaataaatgtctcatctgtgtttgtctaattccgggtatccctgtatacttattggccatgagagtgtgagactctgtagggacttgtgagcccacaaattcttttctacatagaacaagtactaaggatgccatcttatataagagccaacatgtgcacacactaggtcctgaagatttgtatcttacattgcagtctgtggccagttactttgggttagaacaccccagatttgaatgaagcggagcatccagatggcttcaagggtgggtttcaggtacctctgctccttggtcactgagggctcccaccagaacagtgtaggccagtctgtaaatagccatccccactttagaaagcacatgcgctgcactaaacacttaggtatctctgactcacgccctgctcgtactgggagagactttagttaaaccaaactgtaaatttaacaactgagaaaatgaaaccgttaaaagataagcaacttgcccaaagtcataccgccaatgagaacagctaagtctcaaaatcatgtctccagactcctaggacagtgccctttagagcatactgtgacattcagtcatattcttggtgcctgtacagcttttagttcttgaactcctggcctcaagcaatcctcctgcctcagcctcccaaatgctgggattataggcgtgagccaccacatctggccctatattattatttacatctttttgtacgttagaggtatttcctaataaattaaaataaattcgtatacagaaatattaataaatatgtcacctgtccttagttcattagattatatgatgattcttcaagttatatgatctcatgccctgtctgattccatttggggaatacgcattcctccccgaccttaaatccagctctcttctccactgagaattctctccctcccatctgtggctgagattaaagatctgcacctgaagcactgaagaatgtgtgggtaattaaattaccctgccgattcctggagatgctgattacctggagatgacctcagagattatcctaaattaactcctacaagacacacattgcagcgggaggtgaggtaggggaaggattgtgcacctgaggctagcaaaggtttccactctgtttagagatgatgtcaccagtgcgtttacatttgcgttgtgttcacacattgagtgctactatgtacaagaccatgtgtcagacactgaggtaacaggtatagctactagatagagttcatagctatggaggcaagcagattcactgactgctaattctaacatgatgtgacagtgcaactagaaaaacataaacaagcactatgtgagcacaaagaaggtgcacatcaactccttacaggtacctgtaaaagccaaagggtaacagttggattgcaccttgaagaggatgcacttttttttttttttaagacagaatctcactctgttgcccaggctggagtgcagtggggcaatctgggctcacttcaacctctacctcccgagttcaagcaattctcctgcctcagcctcctgagtagctggtactagaggcatgcgccatgatgctgggctaatttttgtattttcggtagacgtgaagtttcaccaagttggccaggctggtcttgaactcctgacctcaaatcatccacccacctcagcctcccaaaatgctgagactacaggcgtgagccaccgcgcctgacctggatgtaagattttgataggtacagaacaaggaaaagactttccaggccgggcacagtggcttatgcctgtaatcccagcactttgggaggccgaggtgggcagatcacgaggtcagcagttcaagaccagcgtggccaacatggtgaaatcccatctctactaaaaatacaaaaattagccaggcatggtggtgggtccctgtaatcccagctactccggaggctgaggcaggagaattgcttgaacctgggaggtggaggttgcagtgagcaaagaccgcgccactgcactccagcctgggtgacagagggagactccgtctcaaaaaaaaaaaaaaaagactttccagaaggagcagcataaacacaggcatgacatgtttccataatggcaagtggccctaaatgactagaatataaggtagatccagtaggaaaggacttagaaggggctttggaaggtgagtctggaaattaaaactggggtaaacgtgatggaccctgaacatcattatactgcttaagatgctaatcttaatcctgaaggtaatgggaaaacctcctaaggtttatgttattttctttctacttaggctatttaaaaagtggagtgacggccaggcgcagtgactcatgcctgtaatcccagcactttgggaggccgaggtgggcggatcaccaggagttcgagaccagcctgaccaacatggtgaaaccccgcctctactgaaaatacaaaaattagccaggtgtggtggtgggcgcctgtaatcccagctacttgggaggctgaggcagaagaattgcttgaacccgggaagtggaggttgcagtgagcagagatcgtgccattgtactccagcctgggcaacaagagcgaaactcagtcacaaaaaaaaaaaaaaaaaaaaaggagtgacatgcttagatctctgttttggaatgacaggttttttgtttctagcatcaatccaaggttcatggcttgagaaggtgtactgccagcaatgccattaaccagcaaagggaatgcaggaagaggaacagatctggtgggcatcagtttggatgctctgagtttgagctgcctgtgaaaactgcaggtggtgatatgcaattaacattcacatacggagttcaaaactagagacacaaatttgagagtcatcacagaaatgtgaagtgtgttttctataactaaagataaccatgctaacatagccatgtgttacattagcattttttttttttttgagacggagtctcactctgttgcccaggctgaagtgcagtgcacaatcttggctcactgcaacctccacctcctgggttcaagcgattctcctgccttagtctcctgagtagctggaattacaggcacctaccaacacgcttggctaatttttgcattttagtagagatggggctttaccatgttggccagctggtctcaaactcctgacctcaagtgattcacccaccttggccccccaaagtgctgggattacaggtgtgagccactgtgcccggccttacattttgtgttttttcctgctgcttgtatgtgtgcaagtctgtgtatcatcaatgggtatatgtgtacctgcgctgacaacaaaaaatgagatgcatatcagctactacacaaagctgttataaggatgaaatgcagttagccagtgctcagtaaagggcagttgctttactactactaggtggggtggtgtatgtgagaatctgtatactgccattagtaggctttagtatgtagtgtgcatatggaattcatgcattagtgtgtagtatgtgtgggacccactcacctgagcagcttctctccccacttacagtggcatctgttgaggattcctgtgagggataaggcagggagtgaacttgttacaaggcagggacagggaatggaatgtgtttatgtgtctaagctgaggcatccaggtcagaggtgctggttgttgaggaagctggcctgggagggcacaaaggcagccaaagctggtgcctggccacaaatatgagctgggattaccgtacatggagatgggggaagggatggacactcacagggacacttagccagaaaaatacacaaagcagacctagttaaaactcaagaactggccaggcacggtggctcacgcctgtaatcccagcactctgggaggccgaggcagacggatcacgtggtcaggagatcgagaccatcctggctaacatggtgaaacgcagtctctactaaaaatacaaaaaattagccgggcatggtggcaggcacctgtagtcccagctactcgggaggctgaagcagaatggcatgaacccgggaggcagagcttgcagtgagcggagatcgcgccactgcactccagcctgggtgacagagcaagactccgtctcaaaacaaaacgaaacaaataaacaaacaaacaaaacacaaaaaactcaagagccctcccgcccctccaaaaatacaaaaactcaatagctggccgggcagggtggctcatgcctataatcccagcactttgggaggccaaggcaggaggatcacttgagctcaggagtttgagaccagcctgggcaacatggcgaaacaccatctctactaaaaatacaaaaaaattagctgggcatggtggtgcaggcctgtagttccagctattcaggaggctgaggtaggatgaggcagaagaatcacttgaacccaagaggcggaggttgcagtgagcctaaattgtaccactgcactccagcctgggtgacacagcaagattccatctaaaaaacaaacaaacaaacaaaaaactcaagagcccaacacacatatgtaaaaaactggacggccgggcgcggtcgctcatgcctgtaatcccagcaccttgggaggctgaggcgagtggatcccctgaggtcaggagttcaagaccagcctgggcaacatggtgaaaccccgtctctactaaaaatacaaaaattagctgggcgtggtggcaggtgcctgtaatcccagttactcaggaggctgaggcaggagaatcgcttgaacccaggaggcagaggttgcattgagccgagatcgcaccattgcactccagcctgggggacaagagcgagacttcgtcacacacacacacacacacacacacacacacacacacacacacaaaactggacacaactggccaggcgcggtggctcacgcctgtaatcccagcactttgggaggccgaggtggacggatcacgaggtcaggagatcgagatcatcctggctaacacagtgaaacccgttctctactaaaaatacaaaaattagccaggcatcgtggtgggcacctgtagtcctagctactcaggaggctgaggcagcagaatggtgtgaacccaggaggcagagcttgcagtgagctgatattgcaccactgcactccagcctgggcgacagagcgagactctgcctcaaaaaaaaaaaaaaaaaacctggacacaacttactgagatatgaaactatatggatatttgcggagatgtccctaatataccctaaagccagagacaactgataaagactctatacaaatcaaataggcagttatgcagttacaaaactcttctctatacacaaggtctcccaaagtccctaacaggtacccaactagtagaaacattcatacaaacccagggaaggaacacagaattggtaaagtaatggctgatatgcaacaacactgtacagccacaaagtatgggaagatgctcaagcttggggggcggggggtacaaataggtaagaaatttggattggcatgaaagagatatctgacaatgggagtgaagtgggaagggaggctgggacacatctttggagccaattgcttttctggtaggtctttgtaatgtgagatgagggatggggcacacctaccaaagaggctgagcccctccttcagtccactggccactttgtacactgaggggtgagactcactcttaaaaatctgtagaacactgtcgaggagaaatggaggagtttggggtaacttggacttttgaagggaataagaattgaggactgataaatggaatggggacaggggatatcctcctgagatcacgtcttttttttttttttttttttgagatggagtctcgctctgtcgcccaggctggagtgcagtggtgcaatttcagctcactgcaacctctgcctcctggattcaagcaatcctgcctcagcctcctgagtggctgggattacaggcgcacaacacacccagctaatttttatatttttagtagagacggggttttaccatattggtcaggtctcaaactcctgacctcaggcgatccacccgccttggcctcccaaagcgcggggattacaggcatgagccaccgcgcccagccgagatcatatcttgatgtaaggtttgtcccttacttttctttgcctcagtttctccctatagaaaagaaagctagtatctttatgcttttcttcctctctttccctcaaaaccccccttccctttccttcaaggagagagatcttaatagccccaggattagggaaactagagcctcattaggattattggggcattaaacttaatccttctccctccccagagacagcagcatgcctccacctctttacctgtaagtgtcttgatctatgttcaccagatgagtcctgaggacagaaaacaaaaaagcaggaagcagtctgagttcgttccacaactccacttcctttgtccccctctctgaatattgtcccagtcttcttcccaaagtctcattagcccttagattctcccgggtgtcctagagcacttgacccactgggtcacagccacatccacaccccacccccactttacttttcaggcctcccaatcccacattactttggttggggttggggtgaatcacctacaacataaatttcttaaagcccaggatggggacgctgacattatagtcttccagttcaaccccgattcttcttcgacccaggaacttcagcagccctccaagtgctcgaacctgggaggggatcagcagtggaatcggggtaaatcttaaatctcctgggggctgcagagcaccagggaaagttactattttccagggctaggccagtacctcccagaattcagccctagcacttgtgccgcctcccagcccttatcccccaggaccaatctcactgtgaggaggcagtcaaagggaataatggaagagaggaagaggattttctcagtggcagtcatggcgtctgggatgaaggagtagtttccagaaaggaggcgttgtttgcttatctccagacctatttgagggaggcaagcaaagggaacggtcttgtagctcaattttttcaccccattttaagaatgagacaatagaagcaagagagattatttgacttgcccaagctcacacaggcagttaatggaaagctagagcaagaaccaaattttcagactcttagtctaattctctttttattctacatataatataaagatacttgtctgaaagcacagcctgagaaagataaatggctgaggaaagtagacatctgtctggaattgaggattttggtcaaaataatggtattaatagaactagtaacactaatgccttaatatctaattaggatagtacactcctgttcttattgtaaacctaggaaagttatagaagtgccttatggatcataataagggtcactgaggcagtgccttttggtttggtgataaaaggctttaacttaatggggagaattccaacaataaaaccctgtccaaaaagtgtcaccactcctcaggggaggccctcatccctagacatgacttaagcagaggcttcccaataagctgcaggttattaaagggtagggagcaggagagatcttggggggacaggtcatagggcatgaggagcacaaaggtttaggatgacataaggcagaggggagatctgtgatgatgaaggtagagttgggggaaagaatgggacaccggaacagggagttaggctaagcaaaaggaaggagataccaaaatccacacttggcaaaaatatgatttcaggtcttttaggctctctgtgctcctgggaggctgtgggggaggaaagaaaaggctatcattctttacatctcagtccttctacctctgtctgacactccctctcacccaattctagccccctggaatattccatatattagtccttccccattttccctctatcctttaccaagtccttaccaagctttcccagaaatcgagtcatattctcatcctgtttggcactcgtaacaacagactggggattgatctcatccagaacttggaaggagaacagagatcaaatgagttaaaggatctttgtctttgactaagagaaaacccatagccctcctcttcctacccctctccttctcaaaaacatttcctccctaggagtagggagtgctctgcacagtgggaacacaggtagaagttgagatttagaaaagtagttaagagtggtgggatggtgagagggaagtgggatgttctggatgttgtcactaggctgtaaacccctggagaacagacatgactgatttgcccagggctgaatctgaagcacctgaaacattgtaaatacgtcatatatatttgtggccaggcacagtggctcatgcctataatccctgccctttgggaggccaaggcaggcagatcactggaggccaggagctcaagacaagcctagccaacgtggtgaaaccctgcctctactaaaaatataaaaattagccaggcgtgatggcagattcttgtaatcccagctactcgggagactgaggcaggagaattgcttgaatccgggagacggaggttgcagtgagccaagatggcaccactacacttccagcctgagtgacggagcaagacactgtctcaaaaaagaacaaccaaacaaaccaaaaaacaacctcacaaatatttgttaaataatgaaatgaattcataaaaacaaaagagggagcctctgtgaagcaactgtaaaatatattgagtcagtgctatagtttggatgtgatttgtccctgccaaatatcgtgttgaaatttaatccccagtgtgatagtgttgtgaggtagggcctagcaggaggtgtgtgggtgatgggagtggatcgctcatgaacagattaatgcccttcctggagtgtgttggtgggtatgagtgagaggttctcactctattagttcctgagagagctggttgtcaaaaagagcctggcatctccctcccccttgcttcttctctgccatgtgacctctacacaccctgccttcccttcttccatgagttgaagcagtctgaggctctcaccagtgaagatgcccaattttgagctttccaaccatccagaaccataagccaaataaaacttttttttttttttaacaaattactcagagtcaggtatttccttacagcaacacaaaatatgctagacagtgaggtgagttaatgtaagtaaaacatggctgggcgtggtgactcacacctgtagtcccagcactttaggaggccaaggtgggcggatcacaaggtcaggagtttgagaccaccctggccaacatggtgaaacaccatctgtgctaaaaacacacacaaaaaactagctgggtgtggtggcacacgcctgtagtcccagctactcgggaggttgagtcaggagaattgcttgaacccaggaggtggaggctgcagtgagccaagattgcgccactgcacttgagcctgggtaacagagcaagactctgtctagaaaaaaaaaatatgtgtgtgtgtgtgtgtgtgtgtgtgtgtgtgtgtgtgtgtgtaacacatctgcaatcccagagagcagaggaattcatggttccatccccacctctctggagaagcttgaggctctcgtggtctggggcatctggcatgaagtggatagtggagtcactagtatcatagtaggcaatgcccaagtatcctgaattccacagcacacacagatggatctgtccagcaaggaagaaaggaaatcactattagaatcactcataagtgtagggtttaccatgtcttatataatttaatcattttctcaaatctctgagataggcatcatcacccccatttagtgaatgtgaaacagccactcaggaggtaagagacttgcccagctcttcccaaccctgttttttttttctttctttctttgagacggagtcttgctctgtcgcccaggctgaagtgcagtggagcaatctcagctcattgcaacctccgcctcccgagttacagtgattctcctgcctcagccttcccagtagctgggataacaggcacgtgccaccacgctcggctaatttttatatttttagtagagacggggtttcgccatgttgcccaggctggtctccaactcctgagctcaggtgatccgcccgcctcagtctcccaaagtgctaagattacaggtgtgagccaccgcgcccggctcccaaccctcttttattctaacttcccatcaactctccattcaagtttctactcccctcagagacctcggccagctcctcctcctcctcgacttcctcctcctcggcctccctggggcccggcactggggccgggctggggaagccggaggaggccgccccaggtctcggtccctgcggtgtcctccttgggttcgctcctaaggaggccatgagcttggaggctctgcggatgcaaaaagtgagggcggttcggaagcaacgattcacagaggaggccggggtagggtggcgcgcagaatgcaaagcactaagtacttctgctacagggctgcggggcagggctgaggggcgtggagagctgtggacacaggaggtgaattctcgggtatttaactaaagtacagattgtgggaaactccacgcgccccaccctcattcctgtcacgcggaggttaccctttggaaggaaggggtctgagggccctgtggggcgagtcgtgcacgtcttatgtctctgcctctgccaaccacgcgccaggaccccagcctcacgcgcttatcttcctcctcccccagctgccgccatcgcagcgttttcccgccttttcagtaacctgagtcgctacaggtgggagaacgccccgctgaccgaccgccacgagcctgcaaaaggagcgcgccggcgcgtgagcgaggtgcgcgcgcacgcgccccgccctcctagccgctgttgattggagaggcccggatccagcctagagatccgacagggcgaggaggagaagcggactgccgtagctgaagagtctggacgctgattggcctatttgccttcggggcgggtccagaacgttcaaacttcccgccctctgccgttgcttagcagccgggcctctagcactcactgtttctgggatttgattggcgcagtgggaagcccgcgagaaggtcggaccagggtccgtagtcccagtccctggaaggggtttgggaccgttgcgggggttttgagggggaggccaaacttaaagagccagaggcgcttattttttttcctgcaacaactcttaagttaatatttgtaccctctgagttaatatttatacagagcttagaacagtgcctggcaaacaaagtaagacctaaatgagcggtgtttcaaataaataagcggaaacaagcaggacttctgtctcagccctaccgtgcctgtttcctgggtacagggtatgaccacccccataatggcacgacagggcctaatttattatttaaacccttcaagcagaggtggaagcattcgaattacatcaaattctggcagagagaagtagttctgatcagaacactcacacccctactgggacatgcccataccccttcgcacttctacacacccctgaagacagagaggtatctatcattcatgcattcggcaactatttagtgcctattttgggccaggggttggactcaaagcggtgaacataatgaagtcactgctccataaagcttatttgtgcgtctgtgtgtgtgtgtgtgtgtgtgtgtgtgtgtgtgtgtgtgtgtgttgcgggggtggggttatgagggagaaagaaaaaaaatatatatatatatatatataatccctttaaatgcaccatcctccccagctttgttcctagtaccctgagatggggagattcctccccagccccccaacccaagaagttaggaaagatggtgggggtgagatgacctagctgtgctaaccagtaattggaaaatcccctccagcaagaaaggtgggggaacagagttaagggctgggttaatggttacccctggcaaatctgttgagcaatggagctatagaaacttggaggaggttggtgacagctctggggagtgtcagggagggacccaccttccaatctggggtgtgaagagattagggactagtttaccaagcccaggaaggggagggagtggaaagagaagcccagagagggaaagaggagctactgagataggagaaatgcagggacagggaggtgagatggagggaaacctctgttgcaggatttgggggtacagccctggctctgctggatggttccaggagagggcagcgttgcctgtcacctggtaaattaaggcacgataccctgtgggtagtcatgccagccagccaaagtcaatattgatatcaaggcagctgtagctataaagctgtaggagagaaaagagaggccgggagaggctgccaaacctgtttgatcttcaagctggccccatttacctaaggcttctcttggacacagaccagttggaacaggagaggaccctgagaagtagagttgttttgatcccctcccctcaatgggaaggggtcctgtgtgcagattttgagggtcaccatgagggaattcacacccacacagaggcatggaatcatacccttacaggatgttacagttcaagggaacgaacaccaaagatagcctttctgtcgggaggagagaaaaaggccctcccacaagcaggagaaaacccacagaagaggaagcacaagaggaaaccaccaactgctggtttccagcagcacatcacgtcactccaccccactcctcccccaagtctctccctttctttaagtttcaagctctgttttagttctgtgttcttgcactccaccatggttttctggaactgtaggtcttttgttggacagagggtgatgaggaggatagagaagggatggttggacaggagagaaattcaggatatggaggctggaattc

SEQ ID NO: 704 - DNA, 1522 bp, Homo sapiens
ggttgcggcgggcggaacggtgtctccttcacttcgccctccagctgctgcagctgcagcccgaccgcgagcgtgccaagcggcttcagcagctagcggagcggtggcggcggcccccctcaggacaccaccagattcccctcttcccgcggcctcgccatggcgacccacggacagacttgcgcgcgtccaatgtgtattcctccatcatatgctgaccttggcaaagctgccagagatattttcaacaaaggatttggttttgggttggtgaaactggatgtgaaaacaaagtcttgcagtggcgtggaattttcaacgtccggttcatctaatacagacactggtaaagttactgggaccttggagaccaaatacaagtggtgtgagtatggtctgactttcacagaaaagtggaacactgataacactctgggaacagaaatcgcaattgaagaccagatttgtcaaggtttgaaactgacatttgatactaccttctcaccaaacacaggaaagaaaagtggtaaaatcaagtcttcttacaagagggagtgtataaaccttggttgtgatgttgactttgattttgctggacctgcaatccatggttcagctgtctttggttatgagggctggcttgctggctaccagatgacctttgacagtgccaaatcaaagctgacaaggaataactttgcagtgggctacaggactggggacttccagctacacactaatgtcaacgatgggacagaatttggaggatcaatttatcagaaagtttgtgaagatcttgacacttcagtaaaccttgcttggacatcaggtaccaactgcactcgttttggcattgcagctaaatatcagttggatcccactgcttccatttctgcaaaagtcaacaactctagcttaattggagtaggctatactcagactctgaggcctggtgtgaagcttacactctctgctctggtagatgggaagagcattaatgctggaggccacaaggttgggctcgccctggagttggaggcttaatccagctgaaagaaacctttgggaatggatatcagaagatttggccttaatatatttccattgtgaccagcagcaggcttttttcccccaagaagatgatcaaaacaaaggatgatctcaacaagagctgtattttaagtatttagacagttctttgttagctggtttctagttggttatctagttaccaatgctgcagtcctgcagtcacctatacattatttaaatgtatttaactgttaaatgcgctacccaccaataatgaaatagacctttatgaaaactgtgcaattgtgtgcatgtttgtttttatgttcctttagaaaacattgactgttaccattgaatgagatggatcagtggatattaagatgaggttacaaattttgttaagttcagccattattacttttggtatcccagaacatgacaaattatgaataaaacaagtatacataaaaaaaaaaaaaaaaaaaaa

SEQ ID NO: 705 - DNA, 1473 bp, Homo sapiens
caggatacacaggataaaatctgaatagaacaaagacccaatttttaaaatgaaaccctctttctaactagaagaaaacatagatgaattattgtataatctgacagtgagaaaaactttcctaggactgaaaattcagaagcaataaaaagagaagtctatagaagaattttcagccagatggaatggctcatggctgtaatcccagcattttgggaggctgaggcagaaggactgcttgagaccaggaattcaaaaccaacctgggcaacctagtaggactggctctaccaaaaaaaaaaaaaaaaaaaaaattaagtacctggcctgggttccacctacttgggaggctgaggtaggaggactgtgagcccaggagtttgaggatgcagtaagccactgcactccagcctgggtgacagagaagaaaaaagatttttttggatagctgaaaatatttgcagcatttatcacagagggctaattgtagccctatatatgaagaattttaaactatgagaagaacccgaagaataggcaaaaggatgtgaacagacagttaacagaaaatagaatgcaaatggtctttaaacatacaaggatatgcataaaaagacaaatgcaaaataaaataaaataatggaaatacctttcttacctgtgagattggggaaaatccaagttaggcaatgcactctgttgagacaatagggaaacaggcactccaaaaattacaaatccctgtggatggtatttgttaactagcaaagttaaatgagtatatccttcaacctggcagacccagttctaagaatccatatgagatgcacttgcaagaatatgaaatagtatatgcacaaagatcttgattacagcactgtttctaatagctacagactggaagccagccaaatctccattgatagggaattgatggaaggaactagggtatatctatacaatgggatactacacagctgtagaaaggactgcgaactatttttgtagttctggtctggagaaatctccagaatataggaaatgaaaaatgtaaagcacagaagagaatgtatggtgtgctgtctgttgtataacgaagagacaaatggaaaaaatatgtatttgctttttttgtaaagcaatagaagaattagttataccaataactaataaaatgatctccttgttagtggtggtagggagctagacaaggatggcaactatttctgtatcttacataccttttattttgaggccctgtcaatgttttatataataaacattttttgaaaaggcaactcttaaaactaaaacaaacttaacagtctgtcaagttggtgatataaccccacagaagacttacttcaagtgacttgaaaacttagtattttgtctgtactttgctaatggaatatatcctacagaccaaacaaccacaaataaatcttaaactgcaaaaaaaaaaaaaaaaaa

SEQ ID NO: 706 - DNA, 5828 bp, Homo sapiens
agtgcggttgctgcgcggcagcaagctgctaagaagaaatttcctgacttgtttgtcttcttggaagattcctcctcatgtctcaaaatcttcccagtcagaagctctactcaatataacaaataatggaatacactttgctcccctgcaaacatttacagatgaggaaatgatgataaagagttcagttaaaaaatttgctcaggaacaaattgcacctttggtttcaaccatggatgaaaattcgaaaatggagaaatcagtaatacaaggattatttcaacaagggttgatgggtattgaagttgacccagaatatggaggcacaggagcttcatttttatccactgtgctcgtgatagaggaattagccaaagttgatgcatctgtggctgtcttttgtgagatccagaacacattaattaacacactgattagaaaacatggaacagaagaacaaaaggccacctatttgcctcagctcactacagaaaaagtaggaagtttctgcctttcagaggctggagcaggtagtgactcatttgctttgaagaccagagctgataaagagggagattattatgtcctcaatggatcaaagatgtggatcagcagtgctgagcacgcagggctctttctggtgatggcaaatgtagaccctaccattggatataagggaattacctccttcttagtagatcgtgatactccgggccttcatatagggaaacctgaaaacaaattggggctcagagcttcttccacctgcccgttaacattcgaaaatgtcaaggttccagaagccaatatcttgggacaaattggacatggctataagtatgccatagggagtctcaatgaaggtagaataggaattgctgcacagatgctgggactggcgcaaggatgttttgactacactattccatatgttaaagaaaggatacaatttggcaaaagactatttgattttcagggcctccaacaccaagtggctcacgtggccacccagctggaagctgcaagattactaacatacaatgctgctaggcttttagaagctggaaagccattcataaaagaagcgtcaatggccaaatactatgcatcagagattgcaggacaaacaacgagtaaatgtatcgagtggatggggggagtaggctacaccaaagattaccctgtggagaaatacttccgagatgcaaagattggtacgatatatgaaggagcttccaacatccagttgaacaccattgcaaagcatatcgatgcagaatactgacgtctataggagtgggacccctccctggtgtcactgctgtaaaattttaaacggttgtgtcttgttgggagtaagtgccttgcgtgggaataaacttccacagcattcgaatattttaatgaagcccttagtcagggtcctggtgttggcctttttggttttctcttttcaggctgtttaacttaggcacaggagatccacttttaaacttgggaaataagcacctgtatttttttccaaaactgtttttaaagcagtatacgcatacatatatatatttttactctgtcttactctgtcacccaggctagagtgcagtggcgcgatctcagctcactgcagccttgacctcctgggttccagtgattctcatgcctcatcctcccaagtagctggaactacaggtgtgcaccaccatgcctggttcatttttgtgtttttagtagagatggggttttaccatattgcccaggctggtcttctggcttctggatatcgcccaccttggcctcccaaagtgctgggattacagggatgagccaccgtgcctggctgggtatttatattatcattctagtttcagagtatacagaagtttcatcccatcatttggaaaaataaaggcatctgaagtacaatattacttatagaaatagtttatattcctattaaatcttaatcttgtggcatcagggaaatatttgttacatagtaggcaatttttatccagtactttatagattcaactctaagttgcaagcgaagtcaaaactgatgaaaatttatttagaaaaatctaaaaattctggttttaaatatgagaatcagtggaaaataagggtataattttgtaggtcatatgattgaagaaaatattattttaacaatgtaaagcaatatgatttgttactataattaacctgtataaaagatacattttatggtggtttcagtaggtcattttaaaaaccaatgtgcattagttttcaagtataaggtttaagtaatttggtttaataatcagaaaatattcaatacagtgttggatattctgtcatgcactatttttcagttgacaatttctgtattttaattgaatactgtttcttcagtcatggttattgcactttatcctgaataataattcagaaattgggttttggttcagtgattctcaagaaaaagatctcttgcccattaagaagtgtatcaaaatctcataaggaatgagggagagaagggggctgtagagtttgaaaaagcatattcaatattaaaatagttttatatttgggaaggcaaaaatgaatctattgttttgcaatataggttataaacaggcaaaatgcaataaaatatatatctggttgtattagtctgttttcacgctgctgataaagacatacctgagaccaggaagaaaaagaggtttaattggacttacagttccacatgactggggaggcctcagaatcatggtgggaggcaaaaagcacttcttacatggcggcagcaagagaaaatgagaaagaagcaaaagtggaaacccctaataaacctatcagatcttgtgagacttactatcacgagaatagcacaggaaagactggcccccatgattcaattacctcccccgggtccctcccacaacacatgggaattctgagagataccatttaagttgagatttcagtggggacacagccaaaccatatcattctacccctggcacctccaaatctcatgtcctcacatttcaaaaccaatcatgccttcccaacagtcccccaaagtcttaactcatttcagcattaacccaaaagtccgcagtccaaagtttcatctgaggcaaggcaagtcccttccacttatgaacctgtaaaatcaaaagtaaactagttacttcctagatacaatgggggtacaggtattgggtaaatacagccattccaaatgggagaaattggccaacacaaaagggtaacagggcccatgcaagtccaaaattcagcagggcagtcaaattttaaacctccaaaatgatcacctttgactccacgtctcacaatcatctctctcaagttcgaagttccacaaatctctaaggcaagggaaagatgctgccagtctctttgctaaaacacagcaagagtcacctttactccagttcccaacaagtttttcatctccatctgagaccacctcagcctgaattttattgtcaatattgctatcagcattttgggcaaagccattcagcaagtatctaggaagttccaaactttcccacattttcctgtcttcttctgagcccttcaaactgttccaacctctgcctgttacccagttccaaacttgctttcatatttttggctatcttttcagcaatgccccactctactgttagcagtttactgtattagtctgttttcacactgctgataaagacattcctcaagattgtgaagaaaaagaggtttaattggactcacagttccacatggccggggaggcctcagaatcatggcgggaggtgaaaagcacttcgtacatggtggtggcaagagaaaatgaagaagaagcaaaagtggaaacccctgataaacccatcagatctcatgagacttactatcatgagaatagcacaggaaagactggcccccctgattcgatgacctccccctgggtccctcccacaacatgtgggaattccagaagataaattcaagttgcaatttcagtggggacatagccaaaccatatcactggtgatgccacttcttcagtattagggattctcagtcagaagagaccccctgtgtggcctgagtcccctcaggaggaaggtggacaacagagaaatgagagttttgatattttctgaaagaggaacatgtgttagagatgaagaatcttccaaggctcatgcagttgcttagaataatcattactgttatatgagaaacattttagtaatttaataaaaggataatgtttatttaaaaaacctgacttttccagagtaattttgttttgcacattcatgtttattgaagtggactaatttctataatgcaaatcagagttaaatattaaaaattgtgtaaatacaattgacataggaattacattaaaatattaggaagaaacaaggacaaatttagaccttgaatccgaagagataaagcttacttgactttcaaatggagagatgatgaaaacccactcattcagtctttcagaacaaaaagacagtcatctgataagagtatgacatggatgaaatgccctacaggggccttggacatctttaatttctgcgattatgtgaaagaggtggactttacagataatggagcagaagccaacattagtaaaaggaatcccaacttcttcccatagaattagaaacatgtgaaagtacaataaacttcttgttcaaattaccagcatcagagagcttcccatttgcatctagaccttgaatttatatttattgatcaagttctaatttgtatgtatattttgtgcatattcaccaataacagttaaaattaattatgtgttatagttaatatatgcacctaccttcttccgttagtgcatcagtaaatgtgttattttgtcatttttccaaagagagtgttgtaggttttccctgtagttcttcctttatagcttttcttctgataaccatgacttcaggagctttaaaactatctatcttgcatttgtgtctggcggagaactagccatcagcctcctgaagcctgccatcattgttaatttgaggactgggctgtcttggggctcagaaggtaaagaactatttgagcagatgtgtgtgggtggcactggattccacccaactgccaagttagtattgttagagatttcattttacaacacaaaaataagcctgtgtcaaagattttaaaatcatggaaagttaaaatctagaaagaccttagagaaccagccaaccaactctctcattttaaaagtgaaggattcatagcacagattacttgcctaagatcatccaggaacgaagacaagaatccaaatgtacttggggacaagaattagtccccaaattcagtgttcttcctagtattaaacattgcccctttcgacaaattttggatttcattcttgttatatttcagtactcttgctgatttattttaggtttaactggtaaagaatgaacatttcagaagtgttaggattagtcagtgtcatcgcttatgtatatgaatcacttgccaaagacactggctctcctcagctgtaaccagcatgtcaaatgtgaagattattgtgtgggatcctttggtttcattgttatgatgtattttataaatgtactagttatatccttgtttatgtatttttgctgatctttcataaagcagaatggtatgtatcggattgttttaatgttatatattggattgtattcgttgttacaaaaccaatattctatggagaatgaaaaaaataaaggactaaattaactggaaaaaaaaaaaaaaaaaaa

SEQ ID NO: 707 - DNA, 5226 bp, Homo sapiens
aaaatacttgccctttggaaaaaaatcattctggcgtccacattcagactggtttagaggagagtaatactgaagacatgcccccccgaatcaaggtagcaattgcggagatgaaaagaaatgagtccaaaagatgcttaaatgtgaccattgaacaggatttgactcattggatatgaggccatggagcagtgtctggctaggtggatggatgttggtgctgtttagttaaataggaaactggaagagaagcaggcttgcaagaatggtaatattttggacgtgtaacttgtctggcaagatgttgaagaggtaaaggaggcagcacagcatcatgggccttggaggcagaagccgctttgatttactcagaacaccaaatcagtctccattttcttgactcagactacacccaagagattgcttccttccctgtgcttcctggccacttgctactctagctaggaagatctgcctcccttagctgaagtctaagatgtgtagcttattgatgcctctcctcttcttgttctgctgttgctgaatataatggggatgccagggcagacataccattcaacttgaatcttccttacccactttgtatagtcttacatgtcattgataccttgttttctggtacgcctaaaaggagtagaacttcaagtggtatttaaaagctttaagaaaagtcaaatttttacttttttcttcccatctgaggcatggatttattttctttttaaagaaatccaaatttttaaaagaagggatcttatttttaaaacgaagatcgataatatctactatgtactaaatgtcattctttaaaagttgttccctcataatttagtaaattacttccttttttaaaaaaaggaaagaaagagtgtttgtcttacaggctaacatcacaaacaataagtttcttctcatccatctccatttataaactagtgtgactgtcttctgagcacagtattaaacctggacagggagagggagggtgttagagaatgagagggaaagagagagaatacctacatataaggtgaccctaaagaaaagcctttcacccttcggaagatcttttcattttcatttttcttttttcaaacaccaacttgtaccagagggaagatctttttttaaaagcgtttcactaaaatttgtaaggaaataatgagctagataaaatattacagtgtttatttaatgaatttactcatatttaaaataatatctaaaaagagtaatttaggaatattgaggcaatgagacttgaaggttataaatagtggcagtgagaaaaggaatattatagataagctgttgaaaagaaaagatgctaagttttctagtgcttccttctgtttccaagggattatagaaatcggagtttgtttgacctgtttcacaggcatctcctttgtggactcattgtgtctcttccttaggctaatagtcaccatttatcatggacggttgtcatgagtgttgaagcacacttaacctgcttcgtcagagggtacttggcatcaccggtgcacagctggtgtcctagcaggagactaactagctgacacaccgtgctttgttagcctaataatcttatttgttaaaacttgccatttgttggatttttctattttaccccattataaacttcttattgagatcagatgacttctgaatagcatttgctgtatttttccaaggtaaagaatatctttttcagatttttctttctttctttaatgtcagaaatagaagaaatcttttctaccgaccttgtgccaggagatgtcatggtcattccattaaatgggacaataatgccttgtgatgctgtgcttattaatggtacctgcattgtaaacgaaagcatgttaacaggagaaagtgttccagtgacaaagactaatttgccaaatccttcagtggatgtgaaaggaataggagatcaattatataatccggaaacacataaacgacatactttgttttgtgggacaactgttattcagactcgtttctacactggagaactcgtcaaagccatagttgttagaacaggatttagtacttccaaaggacagcttgttcgttccatattgtatcccaaaccaactgattttaaactctacagagatgcctacttgtttctactatgtcttgtggcagttgctggcattgggtttatctacactattattaatagcattttaaatgaggtacaagttggggtcataattatcgagtctcttgatattatcacaattactgtgccccctgcacttcctgctgcaatgactgctggtattgtgtatgctcagagaagactgaaaaaaatcggtattttctgtatcagtcctcaaagaataaatatttgtggacagctcaatcttgtttgctttgacaagactggaactctaactgaagatggtttagatctttgggggattcaacgagtggaaaatgcacgatttctttcaccagaagaaaatgtgtgcaatgagatgttggtaaaatcccagtttgttgcttgtatggctacttgtcattcacttacaaaaattgaaggagtgctctctggtgatccacttgatctgaaaatgtttgaggctattggatggattctggaagaagcaactgaagaagaaacagcacttcataatcgaattatgcccacagtggttcgtcctcccaaacaactgcttcctgaatctacccctgcaggaaaccaagaaatggagctgtttgaacttccagctacttatgagataggaattgttcgccagttcccattttcttctgctttgcaacgtatgagtgtggttgccagggtgctgggggataggaaaatggacgcctacatgaaaggagcgcccgaggccattgccggtctctgtaaacctgaaacagttcctgtcgattttcaaaacgttttggaagacttcactaaacagggcttccgtgtgattgctcttgcacacagaaaattggagtcaaaactgacatggcataaagtacagaatattagcagagatgcaattgagaacaacatggattttatgggattaattataatgcagaacaaattaaagcaagaaccccctgcagtacttgaagatttgcataaagccaacattcgcaccgtcatggtcacaggtgacagtatgttgactgctgtctctgtggccagagattgtggaatgattctacctcaggataaagtgattattgctgaagcattacctccaaaggatgggaaagttgccaaaataaattggcattatgcagactccctcacgcagtgcagtcatccatcagcaattgacccagaggctattccggttaaattggtccatgatagcttagaggatcttcaaatgactcgttatcattttgcaatgaatggaaaatcattctcagtgatactggagcattttcaagaccttgttcctaagttgatgttgcatggcaccgtgtttgcccgtatggcacctgatcagaagacacagttgatagaagcattgcaaaatgttgattattttgttgggatgtgtggtgatggcgcaaatgattgtggtgctttgaagagggcacacggaggcatttccttatcggagctcgaagcttcagtggcatctccctttacctctaagactcctagtatttcctgtgtgccaaaccttatcagggaaggccgtgctgctttaataacttcctcctgtgaattagcactattttctatagttacttattctctggatcattttataatttccatattaatttcaagtatgctcgtgttattcttcagtgatttccacaattgtgcattttattctttggtttaagtactgaagcatataatgaaagtaattgctaagtagcagcttaaaaattcaattatccgattgtatttaacatctttaagagcatgatcataaagagctatttttgacaccccccccccacttttttaacatttagagttagtaagggttttatatctcttctgtccatattgttttcaaaggaatgaggtgtttaggtggctggaaaagcatttgtaggaagttagatttgaatatagacaaggtgggttattcacgttgagaatgttatttgaagaatgcctgtgaagccaggtgtgggttctactcagtgccatagatagactgagtcttctctcgtaggttaccattacatagtaattttgattctgaatttcacattaaattatttgagtttatacagacctaaattttaaaatctgtacatatattattttgatgtattaagatgaatattgctgatttaaattttatttatgcacatacttaaaggacagaaatgtctgggaaagtaattgttaaataatgatatgtaactttttaactttttaaataaataacaagatttttaatgtgtgtctccctcagggttgtttaaagttttttttctccctcaagtataaatagtggtaactatatgttttgtatcttctagcaccaactgctgtaaagcaatgctgcaaataatgcttgaatacaagtggctaagccaacaacagaataaatacttttatagtagttttataatcctgaaattcgaaagctttcccaattgcacttgcatctaaacaaaactgttgcagtttttactctatttattttgttccccatgtttatgaaagtcctgcacagtttcaaaggcatggtaaataatatatcaatgtttatgtagtctgttacagaaacagctatagataacattatccagtgaagagcaaaattcaagctttagaaaatattcatgcatgcaattttgacatatctaaaaataggtttttgtatatttatggtgggaggtggttgggaacttttaacaaaatggggtgttaatttttgtacagtctgtgggcatttacacatttttaatgtattaaaatttggtaattatgtgtacattaaattaataaaagttacttctagttatgatttgtgaattccctaagaccttggatttttttaagtaactttatatcagaaatgatactgcatctttatatttttaaaattgtattgctgctcaagaatggtaccctcttgtcaaaaaggcatacattcataattgtacattcagcattgtaaataatcttatgaaaccttttttgattgaagctattcaaaataaaaattttaatgaatgaaataa

SEQ ID NO: 708 - DNA, 972 bp, Homo sapiens
atggattcgaaatatcagtgtgtgaagctgaatgatggtcacttcatgcctgtcctgggatttggcacctatgcgcctgcagaggttcctaaaagtaaagctttagaggccaccaaattggcaattgaagctggcttccgccatattgattctgctcatttatacaataatgaggagcaggttggactggccatccgaagcaagattgcagatggcagtgtgaagagagaagacatattctacacttcaaagctttggtgcaattcccatcgaccagagttggtccgaccagccttggaaaggtcactgaaaaatcttcaattggattatgttgacctctaccttattcattttccagtgtctgtaaagccaggtgaggaagtgatcccaaaagatgaaaatggaaaaatactatttgacacagtggatctctgtgccacgtgggaggccgtggagaagtgtaaagatgcaggattggccaagtccatcggggtgtccaacttcaaccgcaggcagctggagatgatcctcaacaagccagggctcaagtacaagcctgtctgcaaccaggtggaatgtcatccttacttcaaccagagaaaactgctggatttctgcaagtcaaaagacattgttctggttgcctatagtgctctgggatcccaccgagaagaaccatgggtggacccgaactccccggtgctcttggaggacccagtcctttgtgccttggcaaaaaagcacaagcgaaccccagccctgattgccctgcgctaccagctacagcgtggggttgtggtcctggccaagagctacaatgagcagcgcatcagacagaacgtgcaggtgtttgaattccagttgacttcagaggagatgaaagccatagatggcctaaacagaaatgtgcgatatttgacccttgatatttttgctggcccccctaattatccattttctgatgaatattaa

SEQ ID NO: 709 - DNA, 3658 bp, Homo sapiens
gggatggcggccaccgggaccgcggccgccgcagccacgggcaggctcctgcttctgctgctggtggggctcacggcgcctgccttggcgctggccggctacatcgaggctcttgcagccaatgccggaacaggatttgctgttgctgagcctcaaatcgcaatgttttgtgggaagttaaatatgcatgtgaacattcagactgggaaatgggaacctgatccaacaggcaccaagagctgctttgaaacaaaagaagaagttcttcagtactgtcaggagatgtatccagagctacagatcacaaatgtgatggaggcaaaccagcgggttagtattgacaactggtgccggagggacaaaaagcaatgcaagagtcgctttgttacgcctttcaagtgcctcgtgggtgaatttgtaagtgatgtcctgctagttccagaaaagtgccagtttttccacaaagagcggatggaggtgtgtgagaatcaccagcactggcacacggtagtcaaagaggcatgtctgactcagggaatgaccttatatagctacggcatgctgctcccatgtggggtagaccagttccatggcactgaatatgtgtgctgccctcagacaaagattattggatctgtgtcaaaagaagaggaagaggaagatgaagaggaagacgaagaggaagatgaagaggaagactatgatgtttataaaagtgaatttcctactgaagcagatctggaagacttcacagaagcagctgtggatgaggatgatgaggatgaggaagaaggggaggaagtggtggaggaccgagattactactatgacaccttcaaaggagatgactacaatgaggagaatcctactgaacccggcagcgacggcaccatgtcagacaaggaaattactcatgatgtcaaagctgtctgctcccaggaggcgatgacggggccctgccgggccgtgatgcctcgttggtacttcgacctctccaagggaaagtgcgtgcgctttatatatggtggctgcggcggcaacaggaacaattttgagtctgaggattattgtatggctgtgtgtaaagcgatgattcctccaactcctctgccaaccaatgatgttgatgtgtatttcgagacctctgcagatgataatgagcatgctcgcttccagaaggctaaggagcagctggagattcggcaccgcaaccgaatggacagggtaaagaaggaatgggaagaggcagagcttcaagctaagaacctccccaaagcagagaggcagactctgattcagcacttccaagccatggttaaagctttagagaaggaagcagccagtgagaagcagcagctggtggagacccacctggcccgagtggaagctatgctgaatgaccgccgtcggatggctctggagaactacctggctgccttgcagtctgacccgccacggcctcatcgcattctccaggccttacggcgttatgtccgtgctgagaacaaagatcgcttacataccatccgtcattaccagcatgtgttggctgttgacccagaaaaggcggcccagatgaaatcccaggtgatgacacatctccacgtgattgaagaaaggaggaaccaaagcctctctctgctctacaaagtcccttatgtagcccaagaaattcaagaggaaattgatgagctccttcaggagcagcgtgcagatatggaccagttcactgcctcaatctcagagacccctgtggacgtccgggtgagctctgaggagagtgaggagatcccaccgttccaccccttccaccccttcccagccctacctgagaacgaagacactcagccggagttgtaccacccaatgaaaaaaggatctggagtgggagagcaggatgggggactgatcggtgccgaagagaaagtgattaacagtaagaataaagtggatgaaaacatggtcattgacgagactctggatgttaaggaaatgattttcaatgccgagagagttggaggcctcgaggaagagcgggaatccgtgggcccactgcgggaggacttcagtctgagtagcagtgctctcattggcctgctggtcatcgcagtggccattgccacggtcatcgtcatcagcctggtgatgctgaggaagaggcagtatggcaccatcagccacgggatcgtggaggttgatccaatgctcaccccagaagagcgtcacctgaacaagatgcagaaccatggctatgagaaccccacctacaaatacctggagcagatgcagatttaggtggcagggagcgcggcagccctggcggagggatgcaggtgggccggaagatcccacgattccgatcgactgccaagcagcagccgctgccaggggctgcgtctgacatcctgacctcctggactgtaggactatataaagtactactgtagaactgcaatttccattcttttaaatgggtgaaaaatggtaatataacaatatatgatatataaaccttaaatgaaaaaaatgatctattgcagatatttgatgtagttttcttttttaaattaatcagaaaccccacttccattgtattgtctgacacatgctctcaatatataataaatgggaaatgtcgattttcaataatagacttatatgcaggctgtcgttccggttatgttgtgtaagtcaactcttcagcctcattcactgtcctggcttttatttaaagaaaaaaaaggcagtattccctttttaaatgagctttcaggaagttgctgagaaatggggtggaatagggaactgtaatggccactgaagcacgtgagagaccctcgcaaaatgatgtgaaaggaccagtttcttgaagtccagtgtttccacggctggatacctgtgtgtctccataaaagtcctgtcaccaaggacgttaaaggcattttattccagcgtcttctagagagcttagtgtatacagatgagggtgtccgctgctgctttccttcggaatccagtgcttccacagagattagcctgtagcttatatttgacattcttcactgtctgttgtttacctaccgtagctttttaccgttcacttccccttccaactatgtccagatgtgcaggctcctcctctctggactttctccaaaggcactgaccctcggcctctactttgtcccctcacctccaccccctcctgtcaccggccttgtgacagttcactcagagaagaccacaccaaggaggggccgcggctggcccaggagagaacacggggaggtttgtttgtgtgaaaggaaagtagtccaggctgtccctgaaactgagtctgtggacactgtggaaagctttgaacaattgtgttttcgtcacaggagtctttgtaatgcttgtacagttgatgtcgatgctcactgcttctgctttttctttctttttattttaaaaaatctgaaggttctggtaacctgtggtgtatttttattttcctgtgactgtttttgttttgtttttttcctttttcctcccctttagccctattcatgtctctacccactatgcacagattaaacttcacctacaaactccttaatatgatctgtggagaatgtacacagtttaaacacatcaataaatactttaacttcca

SEQ ID NO: 710 - DNA, 1356 bp, Homo sapiens
cggcggcgttgttggctgaggggacccgggacacctgaatgcccccggccccggctcctccgacgcgatggggaaggtgctatccaaaatcttcgggaacaaggaaatgcggatcctcatgttgggcctggacgcggccggcaagacaacaatcctgtacaagttgaagctgggccagtcggtgaccaccattcccactgtgggtttcaacgtggagacggtgacttacaaaaatgtcaagttcaacgtatgggatgtgggcggccaggacaagatccggccgctctggcggcattactacactgggacccaaggtctcatcttcgtagtggactgcgccgaccgcgaccgcatcgatgaggctcgccaggagctgcaccgcattatcaatgaccgggagatgagggacgccataatcctcatcttcgccaacaagcaggacctgcccgatgccatgaaaccccacgagatccaggagaaactgggcctgacccggattcgggacaggaactggtatgtgcagccctcctgtgccacctcaggggacggactctatgaggggctcacatggttaacctctaactacaaatcttaatgagcattctccacccatcccctggaaggagagaaatcaaaaacccattcataggattatcgccaccatcacctctttcaattgccactttctcttcttttgaatttgaactctggagttactgttctacagtttggcggggacggggcttgggggttttctcttttgtttgtttccctttctttttcctttttttttttttttttttgttggctttgcgttaggatggctctgatctgacatttgacatgaacacaaagttgccaagatgctccttgttgacttccagcagaatgggaatgggggaaacacagcagttcttgggtaaaagtccctttgtaataataggtttgggatttttttatttcgagagaatctttcattttcctatgtatgcttttttccttttttgcccagtttccttatcacttgctgtagatggcttattttgcattcatgcagactatgttgcaagtctgtttcatctagtaaactgaaaattattgcttaatcaaactgccgtttgtcttttatatttaaggccttccccccccttccttatgagttctaacttagtaatttcaaatgtgaccttttatatctaagaccagtatagtaaacttagcccacagtggcaaataatgagtaatattgtaatatgttccagttgcacctcagtatgttaaacaggtaatgtaagaagttctctgaaatgtcagcaagtaagttctgaaacacatcatgcatgagtaggaataaac

SEQ ID NO: 711 - DNA, 2306 bp, Homo sapiens
cttttctgtcctggttccctgaagcatcgagagggaaccgcggccggcaggccggaccgctccggagaggaggcagcggcagtttgagcccctgtaaatgttatatgtgtacttttttttactatgtggcgtcgaagcctgtggacattttcgcggtccgggtccctgcggcggacgggtcggatcgtgctcgtggccagggcgcagtcaggtgtcgcgtggtcctgatctaggaagagactgcggccttatcaccgtctcggtgtctgctttcaccttcaactgcccccctcctcacctggaccgctcaccctcctcctcccctctcaccccgccatccccaccagtccccacctgtctctgtagactgcaagactcatcaagtgacttgctgagcaaaccctgccgagaagagattttcttcaatcacatctgaataaatcacttgaagaaagcttatagcttcattgcaccatgtgtggcatttgggcgctgtttggcagtgatgattgcctttctgttcagtgtctgagtgctatgaagattgcacacagaggtccagatgcattccgttttgagaatgtcaatggatacaccaactgctgctttggatttcaccggttggcggtagttgacccgctgtttggaatgcagccaattcgagtgaagaaatatccgtatttgtggctctgttacaatggtgaaatctacaaccataagaagatgcaacagcattttgaatttgaataccagaccaaagtggatggtgagataatccttcatctttatgacaaaggaggaattgagcaaacaatttgtatgttggatggtgtgtttgcatttgttctactggatactgccaataagaaagtgttcctgggtagagatacatatggagtcagacctttgtttaaagcaatgacagaagatggatttttggctgtatgttcagaagctaaaggtcttgttacattgaagcactccgcgactccctttttaaaagtggagccttttcttcctggacactatgaagttttggatttaaagccaaatggcaaagttgcatccgtggaaatggttaaatatcatcactgtcgggatgtacccctgcacgccctctatgacaatgtggagaaactctttccaggttttgagatagaaactgtgaagaacaacctcaggatcctttttaataatgctgtaaagaaacgtttgatgacagacagaaggattggctgccttttgtcagggggcttggactccagcttggttgctgccactctgttgaagcagctgaaagaagcccaagtacagtatcctctccagacatttgcaattggcatggaagacagccccgatttactggctgctagaaaggtggcagatcatattggaagtgaacattatgaagtcctttttaactctgaggaaggcattcaggctctggatgaagtcatattttccttggaaacttatgacattacaacagttcgtgcttcagtaggtatgtatttaatttccaagtatattcggaagaacacagatagcgtggtgatcttctctggagaaggatcagatgaacttacgcagggttacatatattttcacaaggctccttctcctgaaaaagccgaggaggagagtgagaggcttctgagggaactctatttgtttgatgttctccgcgcagatcgaactactgctgcccatggtcttgaactgagagtcccatttctagatcatcgattttcttcctattacttgtctctgccaccagaaatgagaattccaaagaatgggatagaaaaacatctcctgagagagacgtttgaggattccaatctgatacccaaagagattctctggcgaccaaaagaagccttcagtgatggaataacttcagttaagaattcctggtttaagattttacaggaatacgttgaacatcaggttgatgatgcaatgatggcaaatgcagcccagaaatttcccttcaatactcctaaaaccaaagaaggatattactaccgtcaagtctttgaacgccattacccaggccgggctgactggctgagccattactggatgcccaagtggatcaatgccactgacccttccgcccgcacgctgacccactacaagtcagctgtcaaagcttaggtggtctttatgctgtaatgtgaaagcaaatatttcttcgtgttggatggggactgtgggtagataggggaacatgagagtcaactcaggctaacttgggtgtgaaaaaaaataaaagtcctaaatctaaaaaaaaaaaaaaaaaa

SEQ ID NO: 712 - DNA, 1291 bp, Homo sapiens
acgccgcgctcagcttccatcgctgggcggtcaacaagtgcgggcctggctcagcgcgggggggcgcggagaccgcgaggcgaccgggagcggctgggttcccggctgcgcgcccttcggccaggccgggagccgcgccagtcggagcccccggcccagcgtggtccgcctccctctcggcgtccacctgcccggagtactgccagcgggcatgaccgacccaccaggggcgccgccgccggcgctcgcaggccgcggatgaagaagaaaacccggcgccgctcgacccggagcgaggagttgacccggagcgaggagttgaccctgagtgaggaagcgacctggagtgaagaggcgacccagagtgaggaggcgacccagggcgaagagatgaatcggagccaggaggtgacccgggacgaggagtcgacccggagcgaggaggtgaccagggaggaaatggcggcagctgggctcaccgtgactgtcacccacagcaatgagaagcacgaccttcatgttacctcccagcagggcagcagtgaaccagttgtccaagacctggcccaggttgttgaagaggtcataggggttccacagtcttttcagaaactcatatttaagggaaaatctctgaaggaaatggaaacaccgttgtcagcacttggaatacaagatggttgccgggtcatgttaattgggaaaaagaacagtccacaggaagaggttgaactaaagaagttgaaacatttggagaagtctgtggagaagatagctgaccagctggaagagttgaataaagagcttactggaatccagcagggttttctgcccaaggatttgcaagctgaagctctctgcaaacttgataggagagtaaaagccacaatagagcagtttatgaagatcttggaggagattgacacactgatcctgccagaaaatttcaaagacagtagattgaaaaggaaaggcttggtaaaaaaggttcaggcattcctagccgagtgtgacacagtggagcagaacatctgccaggagactgagcggctgcagtctacaaactttgccctggccgagtgaggtgtagcagaaaaaggctgtgctgccctgaagaatggcgccaccagctctgccgtctctggatcggaatttacctgatttcttcagggctgctgggggcaactggccatttgccaattttcctactctcacactggttctcaatgaaaaatagtgtctttgtgatttgagtaaagctcctattctgtttttcacaaaaaaaaaaaaa

SEQ ID NO: 713 - DNA, 2575 bp, Homo sapiens
ggaggaggaagcaagcgagggggctggttcctgagcttcgcaattcctgtgtcgccttctgggctcccagcctgccgggtcgcatgatccctccggccggagctggtttttttgccagccaccgcgaggccggctgagttaccggcatccccgcagccacctcctctcccgacctgtgatacaaaagatcttccgggggctgcacctgcctgcctttgcctaaggcggatttgaatctctttctctcccttcagaatcttatcttggctttggatcttagaagagaatcactaaccagagacgagactcagtgagtgagcaggtgttttggacaatggactggttgagcccatccctattataaaaatgtctcagagcaaccgggagctggtggttgactttctctcctacaagctttcccagaaaggatacagctggagtcagtttagtgatgtggaagagaacaggactgaggccccagaagggactgaatcggagatggagacccccagtgccatcaatggcaacccatcctggcacctggcagacagccccgcggtgaatggagccactggccacagcagcagtttggatgcccgggaggtgatccccatggcagcagtaaagcaagcgctgagggaggcaggcgacgagtttgaactgcggtaccggcgggcattcagtgacctgacatcccagctccacatcaccccagggacagcatatcagagctttgaacaggtagtgaatgaactcttccgggatggggtaaactggggtcgcattgtggcctttttctccttcggcggggcactgtgcgtggaaagcgtagacaaggagatgcaggtattggtgagtcggatcgcagcttggatggccacttacctgaatgaccacctagagccttggatccaggagaacggcggctgggatacttttgtggaactctatgggaacaatgcagcagccgagagccgaaagggccaggaacgcttcaaccgctggttcctgacgggcatgactgtggccggcgtggttctgctgggctcactcttcagtcggaaatgaccagacactgaccatccactctaccctcccacccccttctctgctccaccacatcctccgtccagccgccattgccaccaggagaaccactacatgcagcccatgcccacctgcccatcacagggttgggcccagatctggtcccttgcagctagttttctagaatttatcacacttctgtgagacccccacacctcagttcccttggcctcagaattcacaaaatttccacaaaatctgtccaaaggaggctggcaggtatggaagggtttgtggctgggggcaggagggccctacctgattggtgcaacccttaccccttagcctccctgaaaatgtttttctgccagggagcttgaaagttttcagaacctcttccccagaaaggagactagattgcctttgttttgatgtttgtggcctcagaattgatcattttccccccactctccccacactaacctgggttccctttccttccatccctaccccctaagagccatttaggggccacttttgactagggattcaggctgcttgggataaagatgcaaggaccaggactccctcctcacctctggactggctagagtcctcactcccagtccaaatgtcctccagaagcctctggctagaggccagccccacccaggagggagggggctatagctacaggaagcaccccatgccaaagctagggtggcccttgcagttcagcaccaccctagtcccttcccctccctggctcccatgaccatactgagggaccaactgggcccaagacagatgccccagagctgtttatggcctcagctgcctcacttcctacaagagcagcctgtggcatctttgccttgggctgctcctcatggtgggttcaggggactcagccctgaggtgaaagggagctatcaggaacagctatgggagccccagggtcttccctacctcaggcaggaagggcaggaaggagagcctgctgcatggggtggggtagggctgactagaagggccagtcctgcctggccaggcagatctgtgccccatgcctgtccagcctgggcagccaggctgccaaggccagagtggcctggccaggagctcttcaggcctccctctctcttctgctccacccttggcctgtctcatccccaggggtcccagccaccccgggctctctgctgtacatatttgagactagtttttattccttgtgaagatgatatactatttttgttaagcgtgtctgtatttatgtgtgaggagctgctggcttgcagtgcgcgtgcacgtggagagctggtgcccggagattggacggcctgatgctccctcccctgccctggtccagggaagctggccgagggtcctggctcctgaggggcatctgcccctcccccaacccccaccccacacttgttccagctctttgaaatagtctgtgtgaaggtgaaagtgcagttcagtaataaactgtgtttactcagtgaaaaaaaaaaaaaaaaaa

SEQ ID NO: 714 - DNA, 102598 bp, Homo sapiens
tctaacttctggtgacatttcataggaggatagacagtatcttaaatgaagcagaagaatttgtgaagtattaaactaagaagaaaaaaattaacttattgggtgcagcttggcagcccaagaagacatttatcaagtttatataggaacaggaggaacttgctaattaattgagtacactgtctttggtaaaaaagctttggaatatcttttcagccactgtgagtaatgaattaccccaaattcaatgaccgaaaacaatgcatttattgcttgtgagtctaccagccggcttatctgggcctgactctgttgagtttggctggtttcactcagttgtggtcagctggtagatcagcttggagctgacgggtaagttgggtgttggcaagaagatgtttggggcaaagggggtgatggggtcaggtgtctttcatccttcaacaagattccttgggctttttctcatggcatggcaggcttctaagcaaaagagattagaagcgtgaaatgtgtctgaaggcctacggaaagaactggcacaccattactttcactgcattcaattgcccacatcaagactcaaatccaacccatattcaaggggaaggaaaatacatgacccttcttgagtggggaagctgcaaattcacatggcaagaagcatgaatacaaggaagggtggaaagttcaggtcatttgcaatcaatccacctcattagataaggaattttgtctcaaacatgggctgtagaagccaattagaatgacctaggaatatgtgggagtggggttgaaggatattccattaggataaactagaaggttctgatgctaaacacaaaaagtggggatggtcagtgtacagatgtataataattcaaaaagattggtagggggaggatttgaaatctattatgagagaagcatcaaaatgaattagtttcaggaacttgacaaaccctcccagctaatgtagcaaagcctaatttaacctaggggaaaataagcagcctcctaaaaattaattttactaatagacatataaattcctggaaagcaggactgcaggatctgatcatatccctcttgtgtcttttgttattgagtagaaataattcttgcagcttgatcacctcttcatgctgaaagattcatatttaatagagccagactcagtggagtaccaagttttcatttgttcccaatactagtcagtcactttggtgagggtaaatactacaataggcaaattttgctagtatttcaaaaactgatatattgtgcccctctgccttccacccacccctaactcaacctttggaacagtcttctttgctttctagtcttttcctaatattcggtctcaggtagcagagatgagaaagatgcccagagaattggggtttgctatttaatctacgcttcattccccaaatttgcttctgtttcagttctgtctgaacgtggactttagagagactcctattgatatttttttggatgcatgcctttattggaagatcctactccccttgaaacaatacatttctcttaataagactgaactctttctctgtaatcctgatcaatatttctcaggcttctgcttccttttactgtgctgagagtttttcacataattcctcatattttgctatagtgaaaggtacagtttatctaaaaaaggagtttgctaatactttttgattaataagtaacatagtcacaagtttgaggacacaaatcatgagcttaaagcattacatagccttggtgcatccattgacttggtagctgaccctggaaatatgggattcttttcacccttttagaaagacattttccaaaacatacctctctttgaagaatttagttgagtgtctggaatctaaaatttataacattatcatgcatttgtataaactaaaaaatagataaaaggttatgcatttgtcatctactggaagggaggtaaggtaatattataaatgcattttgctgaagttataaatcataatggtgttactagctcaggggctgccaaactttttctgtaaagagccagatagcaaacattttagcctttgcaggactaccatctctgtgacaactactttaatataaaagcagccacaggcaatgaaatacataaaccaatgggtgtggttgtgttccaaaaaaaccattttttataaaaacaagcagcaggctgaatttggcccacagccatagtctgctgactccttcgctagatcagtgtttttcaaactacatattagaacccattattagtggtcagttttgtgaaatgtaacaaatattttgagtaagataaaatcaaatgaagtaaaatatcagcatatattccatcgaataaaaggacatatcatatgaaatatatgtatgtgtttgagtcaatattcaatttttttttgtaggctccagtcatggaagtttgaaggctgctggtcaagagcaatgaaactgagtccagctttggatagtgtgtagtaatgaattaaccttgcccaaagagagatccggcctttgcccttggccactggggagtaacctctaagccctttgaaagttctgcgtgacaagaatgcctttgtttacctggggctttgggccatgcagaaagtctatcatgcagttccagtttgatttctagggccatgtagtatcagcttcatctgagagactggaggctgagaccagttgaccagggagccccagtaaagactctggataccaaggctcaggtgagcttccttggttggccatagttcatgtacattgtcacacagtgttttcaaaagtgtagtgctttccgtgactccactgaaagaggataactggaacctccatgttcagaactttcctggactccactccatgcatctcttcccttggctgattttgatctgtattgtttggctttaacgaactaccactgtgattataaaagccttcagtgagttatgtgagtcctagtgaattagtgactctaaggatggtcttggggaatgctgaacctgaatgggtatcaaaagtgaagtcagtctcatggactgtgttctgtttaccttctaagataggtgaggaaaccataagtcagatgctttcataaaggttgtggagcaaattagcagcaaacccacaatgagaatattaggtttgtagtttccatatttagaggcttctttcttctcctgtgcatcttaatgctgcttgtcaacatttgtggagtgtatctgactttgtgttgaaggctttgtacacattatctcattttatcctcacaaagaccttataaaatatgtactaggattagtgacaaaactgaggcttgaagagcttaggtaattttccctgggtcatacaggttttcaatgatggaatacggattcaaacccagggaatctgattcaacttgagttacttttttcactgcttgatattgtttcttttgggtgttgtacatttccttctttaaagaagctgaatttctttcatttgaaaccaccaggttacctgatatatgtgtaaataacaaataattggccgggcacggtggctcacgcctgtaatcccagcactttgggaggacgagacgggcggatcacgaggtcaggagattgagaccatcctggctaacacggtgaaacccagtctctactaaaaatacaaaaaattagccgggcgaggtggcgggcgcctgtagtcccagctactcgggaggctgaggcaggagaatggcgtgaaccccagggggtggagcctgcagtgagccaagatcgcgccactgcactccagcctgggtgacagagcgagactcggtctcaaaaaaaaaaaaaaaaaaaaaaaagaaacaacaacaacaaaaaaacaaacaaaaaacaaataattggatcacatatataatatatatcttttgtattcccctcagtacacaacataattaacacttaatgaagagaggttgaaacaatgaataagatatagggtaaagggttaaagtcccacataccttcttggtcttccacattgctgttgacaccttggttttcttcctctccatctttgcctccattatcctcctcttcttctttctcttctttcttctctattctctctcctcctttctctcacttcttctcattcttatcctttatatccatcatcatcatgattattattgccaaaaactgattaggctaatttcaacctcctatatttcctaaaagctaagttaaaacaaaatttccgctgaatgaggtatttggttgggctttgcttaaacagatatttgctataatgctgtctctgagtgttttactgctatttacaatacaatgcaacccaacattttctcttttctttcctttacatattagaataaggatacctagatgatgtctggaattagaaagaaatggaaaaataggcagagtataatttctattagtattatttataatggacttaaacctgaagtcaaagaactgttctgactacataatttacagttcaggaaaaagtttttacaggaaaactcccttttgatgaaacagttttcttattttttcaatcttgattacagaatacagataaggacattcacccatttggtcaccagtgggaagaaaaacaatgctttcctgctcctcttttgtttaatattctagtaaaagctggatacttgggaatgcataaaccaagtaataggtaagcataacactgatagtgacttctatttgtatggtcttttggatgttttctatgcacagtcacattatttcatttgaacctgagaagtaggaagaagtacatattataccccatgacttattttcatcctggaaatgagcaaactaagccccagggttaagggacttgccatgggcatgcatctaaccaggacttctaactccaaatacagcgctcttctcaccacaccctgtttttactctgtttaaataaatattctcagttggcttgctattttctcaaatacacattttccctgaaccaagagttcttaacctgtaatatacatggatctacatgaatgagtttcaggagtcagataaccttctaaaatagaattttaaatgttgtgtgtatgtgctgctctctcctgtgctcctccttgtgacaatctacttttttcatctcagaagtgtcaacaagacaaacatggttaggatctcttaccttagcagggaaagtgcttatatccttttcccatatgaaagggataactttgggactttagtttagaccttgttgctgtttcactgtgttggagacttgcagaagattaggaataccctccactgtgccttgtctagcttccactccacagtcatcaaactgactcatcttctcaatcatttcctcccattagctttccctgtcatcacaatcactcaaagaagctgctccttctgccaccaaaaaaaatgttaatggatagaagggctccccactgccatattctgatcacaacttgttgcctttacttattgacacttgaactctatgccttcctctctctttggttgcagtcacctgctcaactgactttttccttagtgacatcaacgtatggctcagagacctcaactccactcttcctccttgtctcctgtcaacttcaagttctaagagtatgactcttctaacactaaaccttagaatgtatcaatctccctaacttgagtgattacaatactaatattatactttctgctgttctattatactgtgctactttaaagtattttagtatagttggtaatatctaccaattttggatattaatgatctctattttgcagctagagagtattaaaattttgaagaaaatgactacactttttaatgcaacactaacctgtggtgttagaagtaaagctcgagtctgctctttggagtgtagtatgaaagagaacatgaaaggggcttctgggttgctggtcatattttggtattgaatggcagccctcgtgacagagttgtattcactttgtgaaaatttcttgcactgtttacgtttagtttatgtgcacttccactatcactttgaaagtgttctgacttcatttcttccctgttaaatatctaaaagtatttctatttaaaatctgatttccctggttaatagcgagccaagcaacttttcttatgatttactcatttgtagttccccaaagctagtttggcccacacttcctgaggttcatgataggattttctttagaattgttgggggagggaatccggagaataggggaccgtgtggcagggggattcctgagtacaagcaagtaatgaagggtgagaggtcgtcgccttgtctaacccccataccgtctctgtaggctgattaatgatgcgcttcactctcatttcttcttattcaaagtctgataaattgtcaggggcttgacccctggtgctcttaaatgatttatttaaaccaggacttatttttatcaatcatctgagccagaggtccaaggcacctcaggtctgtaccctgaccctctttcaggggaagcagcaccttgggcagaatgtagaatatgaagacaaccaccttttgctctgcgataaatcgttaactgaaatatcaaatatcagtactgtctttgcccttcagtgttggagttgctgctgagtttcccttacctttccttcctcttcatctctgccagcactggcttatcttaaaatcctcccaccttcaatatctcaaacatgtgagttttccaggcctccatctctccctttcccttacataaatcctggtatgtgtccacatcctactctagtctctctgtttctcctgattttcccccaccttctgattttctttgcctcgaccagcctgccccaggtgatcagccattttcacctcataccacatcacttcagtgtccggttctttatgattcccggggcttactttctcaaggtcacctctagttctgaattccacccccagttcctccctgtagcccactcacctctcacctcttgctgctgttcttttctgagtctttccttcatttccccaaaactttgctcccaaggcatttctgtctgtagaaaatattgttcatgacttgggtgaaagggagtttacgagataagagaaaacaaggtcaaattgagcaccagacatctctgtacatggaggtctttcagttcttcaagttgtgctgtccagtccttctccaacatttctttctttcttccctttattttccattctagttcacctccaaattttagttaatttctaatggaaatcagtcaatttaactattgttttgcttctcttctttcagtgactcaactttcatttcctctgtttcaccaaaactgtttttaaggtattttttaaaagacagctcttttcctaatataaactcatatgcaatttttctctctttggttgtagttgtaaagcatccacctcttttttctttttttaaaaaaaaatttctgtcaagcctgcatgtctattttcttaagaagtaggggtagagcaaagtacttagaaatccaaagctgatatattcatctgtaaataagtctctgcctcaccatcttagtgagttcattttccttttgctttcaaacttcacctccaactcctctcttccttttctgtctttacctgtttttgtttggaaactgccatcgccctcagccttcatcttggcttgcttgcagagcttccccttggatgacctctctccctcaacagcaaatccctgacaccaactcatttctgattattggcctttgttcccagactttctttggggtaactgtatttcacccatggcatgctcttgctgcatgctcttgctggcccagcagcctttgctaaatctatcatcttcagcttcccttcctcctaatcagctcacagctaagagattagggttccatttgaaccagctcctccatggaggctgctgtgtcctccctcctcttctctccatgcctcctccaccttctttcccttcttcactctgttggtcaaaacatattgaatgtagaccagctgcctttcagtactaaagagaccaggatgaataagtccatgtctgctatcttggtgctcatagtctaatgggaaagaaaattgactaggtaatcgcacaggagtctttagtggttcccagtaacagtatgatgatattttcttattttcttattaaattattgttttctgtattattagtagcaagtatatatttcccacttgaaccttatcaccccatttttcaaaacaatttcagcttttattttaggttcgggggtacagttgcaggtctgttatctgagtatatcacatgatgctgaggtttggggaatgaatgatcccatcatccaggtactgagcatggtacccaatagtagtttttcagcccttgccctctccctccctccctctcccctccaatagtcaccaacatctattattattactatctttatgtccatgagtacccattgtttagatcccacttataaggtttggttttctgttcttacattgattagcttaggatactggcctccagctgcattcatgttgctgcaaacgacatgaatttgttcttttttatggctgcatagtattccatgctgtacaggtaccacaatttctttatccagtccactgttgatgggcacctcggttgattccatatatttgctattgtaaatagtactatgatgaacatgtgagtgtatgtgtatttttggtaggacaatttttaaaatatatatatacccagtaataagactgggtgaaatggtagttctgttttaagttctttgagcaatttccaagctattttccacagtggctgagctaatttacattccctccaacagtgtataagctttcctttttctccacagcctgctcagcatctgttgttttttgactttttagcagcagccattatgactggtgtgagatggtgttaatatctcattgtggttttaacttgcatttctctggtgattagtaatgttgaacatatttttgtatgttttttgaccactagtatgtcttcttttgagaagtgactgtttgtgtcttttgcttacgttttaatggtcactccaaatatttacaagttgaaaatgggaccggttgagctatcaaataccaggagggtagagaaatggaacacctgatcagtttacattttctgttgcttctgaacagtccagtcaaagtttcttcatttttcagtaatgtgcttgttgaactgaatcccatttatttcaagcttaggcccaaatttgatggctcccttgtttgagtcacacatatgttcactaactatgcaccaaagcacaagcctgagataactgctgtgccagccacccaacaatggatcacaagttgccagcacataatgggttctccagcacataatcgattctgccctatgagtgcatttctctttgagacctttggcatcttttcttgcctgccaactttgtgttacattggtccaatccaacagatattttagcatcaaatattagggagcaggagttcattccctcccataaggctctgaacttcttatgaaaattggtttacttcctcctctatgatcagctttgggcagcaacatgtgatgtgagcaggcttccttaggtcatatcagtggatcctactggcaggcactctgaaagagagtgcaggagtgagcctttccggactaaagtaggcctataggtaatttacttttgtttcctcaggaagaaaagaggtggccacttcgagtacaagtcactcagttacatataagatagtgtggtaagaaagttataacgattgacataaaattccatagcctcttgccaagaaggtgaccatccttgtcttatcatggcgttgagtttcatctgcacttgaggtgttggttagatgagaagaaaacctgactaacctttgctgcacactggggttcttttatttctcacttgaattctttactgtatcatttacaaaccttctctcttttcttcaagagtccagcactatttcagcctgccatcttgctggcaaatgtcctacacgtctactcagtggaaaagtttgaaaatatcagatgtacattcccctaatttttctcctacctacatgagaatgtgttaattgttcatctttctttcctggtccttctctttttcgatggagaaacaagtgtctcgttgttttctgttcttgtttttggttttgtttcttttactaagcctgtgtttttgaactccggtgtctgtggatctcctgggacctaagttataccttcttgtcttagattttctacctcttgccctcaattggttatgtttcttttttctgcctaaaaacatgatttgtacaatctacctaaatcaataataacaacaattgtaacaacaaagcaaaagaagaaatttttctttgttcctgcttcctgtgagagcaatactctctatggttttattcaatttcagatctttttatcatcaggtatttcattgattatataatttgcctgcctccattccttactaattaatcatacttaacaataatattattcttaaatacatgcatttctttctcatcttttaaacgagtctccattttttcagaagagaaaaattaaattctatttcttttgaaatattacaatcttattctcactaccaactttctctctatgactttccaactgccaagtccagtgtattgaaagtctcattcacttgtgaccttctatataactggaatctggtttctactcaaagccttttcctcctttgacatcaaaacctcgcctaccatgctcctctgcttgcctctgccatttggagcttttccaacttatttgatagcaacacttttcaggctcttatacacagacataccatgatccctgtcttacacacttctttctttatccttctgcatgcagaaactcaccaccaatccaaaatacatttccccttacagaaaccctcaattgccttattttgccttctaatttaagtacaaactatttggcttcatggttccacaacacacattttggatctcctatgccagtattttctacttttgttcatctgtatatacctatccagaaacagctggttgatagctaagtaaatcttaagcttctctgtctcccagtcactgtgatactatttattctgtctgaaagtctacttgtctctccccttctcgccacctgtcaaggtgactgaggctagaacgcagactgttcaagggcatgacaacgacttgtgggttaaatagaaacttgcttagtaactagcctttcttgatatattattcttgaacaagttcattttgttttttctcatctttcaaagaagtctccatttttaagggaaaaactgtaaattctattccatttaaggaaatgtcccatgatattagaaagcaagtttattcctttttggattaagaaatttaaaatggttaatgtatattttatttttcagtgagaaagttaaaactgcactagaatgacattcctcacttctttcttttgttttctatttaaattgtacattttgctgtgtgctaaagcactggactctgtattatagagagactgtgggtggtatgcattttgtgaccgtgttagttaaagcatgatcatactgttgactggtttggcttagacagtaggaaacatctggcagtttcctgatatttatcaagacagaactgtgcttcctttaaaaacagtttcacatgaacaatgcactacataatagcagaggaattttataacaacaagtataaaaacaagaatgtgactattaaatatagacattaattttataatgttaatcaaaaagttaactctttttgattataaagttatactctagaaatatatcaatgtttatattataaatccagaacagagtgtttgttcttgctgaaaagaatatcagaaaattgatctgagatagtagagcgaactttgatttataattctttgactgtaatgttcaaatatatttacctagcctggcatagtggcatgtgtgcttgcagtcccagctacttgggaggctgaaggaggtggatcactttgagcccaggagttcgaagctgttgtgagctatgattacacactgcactccagcctgggcaacagagcaataccttgactctaaagccagtcccaaatgaacttggaaggaataagaatagatcggataagtgagtggggtctgatttttttctttttgaaccctgtaggtttcaaatcccaagttccaaggtctatatctttcagctaaggaaccttaaagtagggtggctttttatgacttttccactttcatataaatctgtgatggatacctaaatgtggccttgcttctgatctgtatgtcagaaaattggactaaataacttacagttatggttccagagttagcaaatatatcaaccctttatgcttggctcaaagtagatattgctaatcagtcactgagtgctctcttaccgagctagaacagccctcataatcttttccaatagcactgcaggtttactaatcaattggagttgacatgacatgttaaacctatttgctttcccaggtttagactttccaaaatatagcaaatacaatcatttgggcaaaacttatcattaatcgctttccaaaagaaatgctgaaaaactattttggcagcccctcctctctgcctaatacatggctattttaggagacatataactgcatgtgatctgattcctcccttatctttcttttccagtagtgtctgcaaagtttatctcatccagtttgaatagacttctgagcacatcgctctcaggtcttcacagctaatctattttcaaccacgatataacttcctatatccaagacaaggtgtccttcctttttaaaataacttatctttcccagttcctttaattcctttagtttcttccgttttcctaaatgttcatcacttagtcacttctttaccttattatgtctcttctctccaataattgcccctcctcactaaaaatatgctgtcagtttttccttggctttaaccaagcatgcaaagccacagacttttcaccaattctactccctacttaaactagcacattataacatttttccccctttaaccacaatgtctgttaaaacaccaggctgtttcatcaatctcttcttaattccttgcaaggatttttaaactcttggaatttgccaaatgctttcttttccttttagcctctcagtagcattcttgacctgctccgtttctctggcttatctagccctgcacaaaatgaatttcttctttgcttgttctttttgtgtttcctttgttaacattttatataattcctaaggccttattcttgactttcttctcttccccttctctacgtccttctctttggaaaactcaactttgaaattttcagctatcatctctttacagctttcaaattaatgtgagtactccaggcttcactcttagaggtgagtttcacattttcaactccccttctgaacataaacagtgactttctttttccaattacttttaaccttaaggagactttttaacctgtgttttcatctgttgcatatcaggcatgccaaatttagttgctgtccttcagtgtgttttctgggccccattcttcctcccggttccattgtcttctcgattaaagcttttatcaccccaaaacagaaagcttaaaatagttacattgcagcttcatattcctgtctctatagtcttttttctgaaagccaccttgcaaaagatctttaggtttgccatcttaaaccactgttttaaaaccatatgtctcttgtcgaaaaccatcatgggattgctattatctactgaatgagaactgggctccttattctgacagccaaattctccataagccaggcttaacctacctttaaagcttgtgctcatgtcaagcacactacttgctgattccaaaatttgccttgattttttttttatgagtgtgcacttttgttttgccactttagatttctggaattaattcttctacttctatattccatcttttaaaattctactcaatctttaacagccaactcaaacaacttcagcattagccttgaggtagaggtgtgaccaggtccatccaggtggggcactgaccaagaaagaaaaagaaggaggcagtcgagggacatctctgaaggggcataagatttatgtccaacaaagacatggatgctagctaataccatgggattgcttaaggtgagttgtaaaagtgagcagaagagagacttgacatggcctgaaggcaggctaatagttatcttgggagtaggaagaagaaacatgcaaaagacaccagcaagttgtggtcaaatacaggagaaaagccaggaaaatgtgatatgatacaagtcaaaagaagaaagtttttcaagaggaatgtagtatttgatattttccaatgttcctaagaaatcaaaagagatgaaaatcaaaaacaaaaacaagtgggtggtggggaatagaatttagtgacatgggccactgggaacattgatgagagctcttttggtggagtggtaaagggtcaagccagattagtgttggctagtgatcaagagatgaagaagtggagacagcaaaaatgtataatatttctggagagcttgttgtggctgaaagagaatgaggaacgaatcttctttcttgggagtggctggaggtagcttaaaagccattaaaaatattcaggtttaatgggaaagttagaagataatgcaaagagaaaaaacatttgagtaaagttcctaagatagggggagaggataagctcaaaagtcaggagatttagtgtgagcaaggagcaggccacctcctgtcttgcaaaaagacaaagagtagacatgggtgaggagaaaagacatgtgtgtttggtggcttagagcatgtgatttagagattgaagaaatgtccaattgatggcatctattttccctttgagatagtaagtgacatcaacctctgacaccaaggaagaagtgggaagtagtagggatgggagtttcaggagaatgtaaacggtttgaaacagtcattgcagagtaatgtcattgcaaagtaatttgaaaaaaaaattattggaatgccagaaaagaatgtaaatgaagaaagactcaatatgtgggtttattaaggactggtttgttaagaccagtgtgatcaaaatatgggacataagtacatttagaatgtggccaagaatgttttttggggattttttgtttttgtttttgtttctgttcagggatagagtcttactctgttgctcaggttggagtacagtgacaagatcatggcacactgcagcattgacctaccaagctcaagcaatccttctgcctcagcttctcaaacatctgggactacagttgtccaccaccatgcccagctaatttttttgagtttttgcaaagataggggtctcactgtgttgcctaggctgatcttgaactcctgggctcaagcagtcctcttgcctcccaaagttctgggattacaagcatgagccaccacacctgtcctcaagattgttattggaatggtggaatatatattgtgaagaggaaaatgaaggaagaaaaggccagtaggtttaacaaaaaaagaaagaaagagagaaaaaggaagaaggaaggaaggaaggaaggaaggaaggaaggaagggagggagggagggagggagggaggaagggagggagggacggagggagggagataaggagggagggagggagggaaaaagggagagagggagaaagggaggggtgtaattggattggcagtcctgatgagattcaagaagggtctctgatgccttacctgattactcccatctggaagctgttttttatctagcttccccaatcacggttgtttgaactgcttattattgagatgttatccaccatatactgccctatttcaatatggtatgctagctcacttatgtgggctggatgtgtagtacaagtgtctacacacttaaacttactcatgataggtaatcaataaatatttgttgaatgaatgaataagagaagggaagaagaacagaaaggatgaaagtaagaacaatatactttagcttagtcttttgtttacagattgttgtcaacacatatcttactgattatatttccttttcttgcaacttttaagaatgagtatatggtattttagtcatttagtgatcaaaagattgatcaaaagattagattaggttactcaaaccaacaaatgttttatttgaccattaaacataaatttgtgctctctttttattcacaacatgaggcagaaaattgtgaaagtttctagtaattacaattcaatccagagagccagtctgggagtgagtcacccccttgtctggacagtaagtgtccattatttacgtcaatatgctctgtggctgtgcctgcagctaaccctgaatgatagcaaatgtctgcttttccaattctttttcaatttccttctttaagaagaaaacaattgaatgtaacaggatagaactacactgaacatcactattaagataatggcttactgagtttgttgttcatgacatgaatgctgttcctgttacactaataattagccatctgctaaaatgtgaatttttccattttgagctatgaatctgtaaagaatatgagcacattgatttacttcctttgaatttttttattacaattgtattgatatctttcagtccagttttccttccttaacttaaacgtatccctttcctctttaaggatatttcatgcagcgtcaagatacatacaaagtaaaaagcttaaaatttttttaaaaaactgtccattagattgtgaagtgctattttagtgacaatactaaatcgatatttgttgtgttatggctgaattgagtgaatttttcacttgcctagttaattttctgtatgtgaaaagagtagatctcttttactgaatacatcaaagtttacatgcatgatgcctaatggcctaattgaggtaaacaacattacgctccatgagtagaacttcagtctcttttgtttctggtactaagactaattctttattttaggaattattattattattatttcggtcattatcatcatcatcatcacaatagtcattatcatatctgggacctcaaggcccttgccatcaccaggaggtgacgatgagtatctctttttataaagtactcttaaaggcctcatgatagatgtgatttaatatacatccttcaaggggacaaatcctccccaactgcattcctcttgtttatccattttttgaagattttcagatttctagagaatagttattgtggtgtggtatgaaaaagaatgaggaaaagatttgaattcagagtggttcaggttcaaattttgtgtgtattagttgtttgattctgactagattattttggctttgtaaatatcagtttcctcatctgcagattagggataattgctacctgacatgattcatttattcaacatctgtttcttggaaatctaggtactaggtaggtcctgtgaacaaggtaaatggttgatgactttgtgaaacctacaacttatggaagacatcaagcaaatgattttaatttgagtggcagtatatacaatgtttaagaactgaaagtctgggccctatctacctgggttcaaatctcagctctggcccttactggctgcagcagtttaaattgcctaatcttattttgactcagtctcctcctccttttatggataaaggtgggttttcttttttcttctgatgagaggactcaagttcagaaagcttgaaataaagttaggggtagctcataactcaagatggcattttaaggaaaaaataccttcatccttcagaaacctgaacagaagtggaaaaataactgcagttctttaaataagcttttgaatttgaaggtctgtgttggaaacatgactgggacactaaggtccagttggaaccactgagtcaccacctaaatgtatgtgttttactgacctctgatgctgcatggaaagaccaggcttcattcagacatatacatgaagtaggacaagataaaaaggaatcctgatgtgaataacagatcagatacatgcaaacacatgatcacacagttgggaacgtgtattgctgctgcaaacattttcagtctatgaaaatagaaaaacattatccattctttagagagaaggaaaataatgaaaatgtttaaaactttttatgattcaaaatctctcttttcctgtcttaaaatattcagaatgccattaaattaagaaaaatatttattgaatatttaattttgccaggataaaatttaattactttatatcatgtcataaagttttacagcatgtagttacttgtagcatttatgacaagatgaatgaaaaatttgagtaattactttttttgcaatctttttcgtagtacttgttttgtgccgggaactgttctaagagttctaagtataacattccacaattacgtaggaagttaattgttggttttttaatagatttctttgatcagatttagaattttctcttccagtcctactttgatgggagattttcaacattaacaggtattgaattttgtcaaatgccttgtctgcacctattaaatggatcatataatatttctatttatttcattaatactactaattgcagggttgattgattttgtgttgtcaatctaacttggtgtttctggaataaacttcacttagtcatgatgtattatctttttctctgttattagattaaattatctagtattttgtttaaaattttcatatataattttacgtagaatattggtctatggcttcctttccttacaatattttcatcaggttagtagtagggttatgcaggcctcctgaaattagttcaaaaccatttccttttccttaatttttgcaaaatgtttttgtatcatttctattatttcattctgcaaacttaataatattcatgaggggaggtgtttgggcctagtgttatctttgtttatgatgatgaattcaatttatttaatatagtggttttagtagttcttaagttttagtatgcatcaccaccattgggagggttgtcaaaacacaaattgttgagccttcctcaaagcttctgtaggtctagagtggggccaaaaaatttgcatttcaaataagttcccaaaagatgctgttgctgttggtcttccaaccatgctttgagaaccactgcttgcatagatagaggaccattgagctgatgatgctcttggtaaataataacaataaatatttattatttttaattttaatatgtgttccatgctgatacgatttgtgtccccatccaaatctcatcttgtagctcccataattgccatgtgttgtgggagggacccagtgggagataattgaatcacggggccaggtctttgctgttctcttgatagcgaatgagtcttgcgagatctgatagttttaaaaaggtgagtttccttgcacaaactctctcctctcttgccaccaccaagtaagaagtgcttttcacctttcgccatgattgtgaggcctccccagccacgtcgaactgtgagtccaataacctctttcttctgtaaattgcccagtctcggttgggtatgtctttatcagcagtgtgaaaacggactaatacacatacctagttttcttttgattgttttttcttaatggtatattttctcactttttcatgtattttgtattttttttattgacagcttgtcattgtgtaagaaagatatgcttagtgtaaggtctggagtgctacagaatttttgtcacttctcttcctctaccctcagacttcaacaggccttattttcctgcaccttacattgagtccttttaagaatgacatctttccctctagggtagacagatcatcactgcctcgtacttggtgtaagggccatatttcaagaagttcttctcaattctgctttttcctcattcttaggcaaaccttcctgcatcccagtaaaattcatctcaatattactgattgcttgacaccttataatttccttgagacttacatttttggctcttaattcaaatgagttttgccactgctctctgcttattgataagataattatgtattctgcatctttgtgtgctctctggtgatagattataatataattgtccctgccagagctgctttagttaagtgcctggtagcacaagtcattttcctccccaagggtttgtaaacttaatcttctaaaatctttttgttgtccagttactaatagaatatgcattttggagaagggcaaaaacagatatacctaatatttagacctagtctcaatggagttcgtcttttatgagaacttttataaagaaatggaagaaatcccctccccttgttaaatttaaaacaatgaaggtttagtgggccatacctgctgttagtttgaaaaacatggtaaagagcagaattgactctatgcctgaatgttctctcccttttacacacatacaaatgtacacacacattttacacacatacaaatgtataaccaggagcctgttattggttattttcacactaattcaacagagttacatcaaggattaagagaactggaaagatgtcaaaggatgggctatgcaatgtctagtgtccagtctagctttttattttaagtaaaagagttgagagacttgaaaagcaattctgccaaatgaatttttagaaattttattgatgttttgcccgcatgtaattcaacagcagtgtataaacaattcatcattacaaagttatttataaatttattcaacattgtttttatgaaacaacaataccctttctttaaccctcatcaaaacaaatgatgttagggactgtcagctttgcacagtgagtgtatgacacaacttctgctgaaaacgaaactgagtgcactcaaggaacacagaggagtagatggggttcctggcatgatgtaagataataatgaaaaatgacttatgtatttttaagagtttctacttattttatataacacattgtagcaagaagtgttacaggtatttacagaaacgcatgatctcttctgcaagtttccctatagcagttgttattgttgttgttgttaccttgcaagaattctccagcaaacatgtaatattttcaacaggtgcttcatgctcctagtacttgctatccttgagcttaagggcctaagagacagaaccaaatatttaaaaattctagcttccattggatgaaatagaaaacttcaaatttcacaggcagagccacaaggcaaagattcttggggatggggtggtcgtagggacactagagtgaatccctgaggaatgcagctcctgctagattgatttaatttcattttatgatgctgtgccctgctttgtatacaagatacatataatgaaagttgtaatctatcaacatggtatcaaatatttcaaagcatttgattttatccattatatgagttttatctaaatagaagttggaatctcttcttttgtctgattctcaaatactggtttgcagacttttctccttgaccttttcttactttgaatgctttaaatagagaaatagacctacttgcgtggccccaactacaacaaaaacttttatgtttttgtcactcttatgagtccatgccaatggtacacagctatatctcatacagcatgctataaaatgtaatgatttttatctctagctcccctaacatgcttcttgtcaaaggtcatctgttgaagctagacacctaggaaacaccattgacccctactccttccttactcttcacatccaaatgcttctcccagacctcttggctttatggcatttttttcctcaaagttttgttaccaaatgagatgtaagtgtttctaaggcaatatttagaatacctaaaatgattaattataaagggagggattactgttaatatgagtataggttaattctaaaacataagagtttcatgcatgagaagtctgaaatgagatttgaaatatgagtgaactttgggagactggtatagggaggcaaggggaacattttcacctaagatgagagagctaggatacagtctcaggaggacgagaagggcggcactgtcaaatagtgcagaaagaatggggtgaaccaggactggaatgagtcacagcatctgaaccctggggagtcaccagtggtcttgagtgaacagtgtcactgcagttggacatgaagcctcaactgaaacatgaattatgaaaacaatatgtgagaatgtaggaagaaatttaatggtcaagataaagaagaaacagaactgatacctgcagaggaagtaaagagaagttttccttaatgaaaagcagtttttcagccaaggatgggagaagataaaatgagaaagaatagtaataatatagcaagtttgcagatggaggcatgggttgtggaatcaggagtagacatagaggtactatcttccaaagaagatgggacagttttcctccaagatcacagagaaaaaaagatgacaacacctaaataaatttgaggcaaaataaatgtaatattgagagaacttttactatatggttctgatcactggaagcaggaagtgtgttgaaacttagctgggtagcttttaaaaatattaatgctgggtcatactcctaaagattttgatataagtggtcttatggggagcccagatgtcatatttttcagtatttcccaggagactctaatattcagtcaggaccatgggctagagagaagggctggggtgaccatatttagaggcagtagaaaaggtaaacaaggtgtgaacacctacaaagataaaagggtgagtaaggaacaacatcttttcactgaaatattggagaaaaagggaagctggaagaggaaggtgtaatcaaaatgcagtttaatatatttcaagtagatgtggttttttgcatattctttcatcttatttattcacttttcttatcaacttcctcctattttccttatttatttctaaccccaccctttctggttgctttggcattccttccctctttatcatttacttttcttacatcttccattctccacactttttaacttttcctaatttttctgcccattagttcctttctcccttcctctaggcaaagtagcaaaaataacttaggctaggcgaggacagaaaacaagacggttttaataaacgagccaagcctgagccaactgcagaatatggtaggcctaggagatcctggactggcacagcgactactaagaaagttaaatcagaagaaggcaaaaggcagagtcccgtgttatgtccatttccccccagaggtatgatcccaggtgctctggggaaactacagttataccagtgtcagggtatgaaaaaaatactggcaatcagtccacgctttcttgtgccagtgggtatgacttggagattatgctagttaggactgtttcagttacaactgagagaaagcaacttgaaatagcttaagctaagcagaaaattactaaaacagatatgccataggataccaaaggcaggtaaagatgaaaaccaggaactaaaatgctctccaggctctttcatattttagtcctgtcttctgctgactttctcctctccacttgcatgccagggtcctccactgctgtggtggaaattgttgcgtggataatagttttagacaaacaaaatgtgaaagagagcgaggaagagaaagctaggctgtcctaattttagaacatagaagaaatcatccactgggttgaattggaatcacctgttgactttagccctggacagtcagttttcagctcttcaatagcaacatggctgccacatttgcacccctcaaagttaaggaagaaaaaaattgaagaatctgagccaccaaaagatcattgcttcagagactgtccctgaatcttttttggtaacttgtgttaattctcccaaagtttttcaaagataaataattaagaataaatgatatggtttggctatatccccacccaaatctcatcttaaattgtaccccccataattcccacatgtcatggaagggacccagtgggaggtaactgaatcatgggggcagtttcccccatactgttctcgtggcagttaattagtctcaggagatctgatggttttataaatggcagttcccctgtaaaagctctctcttgcctgctgccatgtaagctatgcctttgtttctcctttgccttctgccatgattttgaggcctccccagctatgtggaactgcgattcaattaaacctctttcctttgtaaattaactagtttttggtatatccttattagcagcatgagaacggactaatacaataaatatatcttaacatccctttggtagtttaatacataaaatttctctgttttgaaacaaaaggaataatgtatttcatgaatcaagattcaccctagaagaatgcagtaagtgtacttaaatgtaaaggaaactgaaaaattacaaatgtgataaatttagacaggtgcctaatttcatttatgttctgaatgtgaaacagaagatggggcagggcctccataagtgtgctgcacactttgcctcacacaaaagtgaaagggagatctattgagcagacaatcctgcgcttgaagacaggagtgggcatttactctcaaccctatttctttccattccatctactgttaactataaatcatgtggcttcactggcatttgaaacatatgtgcataagtattagtaatggtaataatagcagtagtaacaacaagagcagattttcctatttgcgtgtttcaaaatttgttttttgtgtcactggttgaaaagtctgagaatcatagcttgcaagcatttcatttactatttcatttatattttagcctagtactaatataactgatggtgagtacttattggcaatgagaaaatagcaatttgcatacaataacagctggagttgatggaaaattccaggaatcattgttttaagtacacgacagtggtaatatgagatgctgattggagtatgatgcagatcagatacctaagccaaattatcttactcatttcccctttgactccaattctgattttacagattctatgctggtctagactactgttgtctaccacctgaaccactgcagcattttcctaattggtttagctacggctactgggctccctttcatttatcctccgcagggttgccagagcagtcatctcataatgccagtctgaacctccaggatgaatatgactatttacgtcagtattttttgctctcttcctggaatcatccaaaagcaacaaggagaggttaaaaactgaacaaaaaaataattgaacttaattttcagtgaatctaaaaaacaggtatgatccgtcaatgccaaaatatgcataaaggaaaatatgcataagctatagccctgtttgcagcagagagtataggaatggagttatagctggagggactggtttgactcagagaaatggaggaagtgaggctgcacaaagattgacgtgtgcaagcagcagtttccttctggtagcagcaactggaggggccattatatttataaagtaaatagtatattttatatagtaaagtatttttatattatatattatatagaacatataaagtatatttatatgttctatataatatataaagtataaaagtatatttatatattttatatattatattatatattatatatttatttatatgttaaagtatattatatatactttatatattataaaatatataaatatactttattatattatatattatattatatatatttattataattatatattatatatagtatatataatatataaagtatatttatatattatagtcaagtatattttataaagagtgtaatattattatatataataatattattatatataatatataaatatactttctatataatatataaatatactttatatatggtcaagtatattttgtaaagtaagactgtaatatttttcagcaaactgcaataatgagtgattgcatttgttttctattgatgtgtaacaatcttaccacaaacttagtgactaaaaacaacacatgtttactatctcacagtttctgtggatgaggagtccaggcacagcttatctgggtcttttgccactgggtctcacaaaaactcagtcaagatgtttctggggctgcaggcttgactggcaaacgatctacttctaaactcacgtggttgttagtagaatttagttccttgtgccagtgagattgagggcctgtttccagctggctgtcaataggaggctgccctcagcttaaggccacatggccctccccatatgatgcctcacatcatgtttcttcaaagccagcaaaggagatgggttacaatcttaagaaaggttacaatcttatgaaacataatcatgtaatcacatatatcccaatgtttttgccatagtcttttggatagaaacaactcaagtgcccacctacacccaagggaagaaatcacataagagcatgaataccaggaggccaggatcactgggagggccacctttaagcttgtcatctatagtgatttttttttttaaaagaagatacatagcatatacaaatattttaagagtctatagaaaaaagaagaaaaataacaataaaattttataagagattgagtactcactagaaaattgttgccatagaatgaatgaaaagtatgaccaaaagtttataattaattgaaaatcttattgacacaatcacctgtatgaaggaagattacaaagtagaaatataagaactcagggaagtgatagaaaaaaaactgaaatagatgaaaagtaagttatagaattaaaataaaagtaaaaaatataatgaaagaaaattagaatgagtacaaggaacactagacacttgacatgaacataaagcatgtggatgtagaaataagaaaaataaacacaaaataaaaatatagtttaacaggattaaaacaaaataatctacaagctcttagaactaacagttaaatttgacaaagttgctggattaacagtcaatatgtaaaattcaattgtatttctatataccattaacttaaaaataaaactttaaattttaaaaaagtatcttatacaaagacatcaaatagctaggaatacttgctactgaaatgcagttaataactgcacaccaaaaactatgaaatagtatagcaagttcttaaagataatataataaaatgaagaggtattctatctttatggattataggattcaatattataaagtggccaagtccccccaaaattattcatagattcaatgttatttcaatgaaagccttttgcaggttattttatggacattgacatatcgactctaaagtctatgtagagaagcaaagggccaagaatagctaggataatttttttttttttgagactgagtcttgctctattgcccaggctggagtgcaatggcatgatctcagctcactgcaacctctgcctcctgggttcaagtgattctcatacctcagcctcctgagtagctgggattacaggcacccaccaccgtgcctgcctaagttttgtatttttagtacagacagggtttcactatgttggccagtctggtcttaaactcctgacctcaggtgatcctcccacctcagcctcctaaagtgctgggattacaggcatgagccatagcacctggcctaggataatcttaaagaagaattaaaagctggaatatttgcatgaccacatagaggaaaaaatgtgtgcgtcagggcttttatatgcagtcaagatgttcaagtctgaagactacaggtatatattttcaacagacaagaggagagtacaatattattaatatgatctttttaaatcttgtaatttgatctctattgcaccaacgattaatacattaaatatatttggctgtatgactatgcctaaaacaaatgaagaaaacagtaggacagaacaaaatagaaatgtatgtgtaatatatagtacatatgcaaatacttatgtatagtatttgtgtttgtatgtataatttatatatgtatatatgtatatgtgtgtgtttatatattatgtatatatatacactcagacacacacacacacacacacacatacacacatacgtatgttctgacaatgtaggcactacaggtgcatgagggtatctgtatttccatcccttccaccaatgcctctcatttagtagctttctaattttgccagagaaacaaggtttaagacattctaagtgctgttctaatttgcattgctctgatgttagcatctctccttaagcttgtaaacttgtgagatttcattttcaaatactcaatagccatgtgggcttactactatatggagagattgggggaccatcttggaggctgtctaccacactaataatagaagcggataatactccccctcactgagaaaacacaattttatatatccatccatacatatatgtgtgttatatgtccatatacatgcttataaaattccaactcaattggtaccaaactatggaccagtgttatgaaagtgtttgataaagttctataacatttcaaagatttctgagaagttgtgtgcttttcattggcatatatttgtttttagaaattagtttcttaacaataccatagttcattagttgtggtgaatgtcttttttcataccaaatatcactctttaaagttagtatggtgttctatgggaatgattctagttctagtgaagatactaagaattgcctcagtatttctgatcccattcagaaatcgttccacacagatgtaatttttcaatgatcaatctcctggtctttttatagaacagttacatgctaccgagtttatatacaagtttttataataagctgacctatgtacaaaatatgactcatcatctatattctggatttatctttacctcaacagtagatttctagtcttgtcaaaagattgtcattgaaaagaaatcagagggaagataaatgatgtcaaatggaatatatgaaaattcaaccatgttacaaaaaaaatagtctttgttttagtgtttttctacatttacccatagtctgaaattatagctgaaccctgcaaaccaactctgatgagcctggaagtccagtttcacaataaacaaagatgaaactaagttaaatctcttgaaagctaatagaaaactgtcaagtactgtttaataatataaattgaaaatcaccagttactaagataaattcctaagactgattttatttctttacacacagggttcaaagcttttgtaatttaatggtcagataaacctttattaaaaaaaaaacacaggatacattatctgaaattcaaaatactgagctaatagattcccaacagttcacagcacagaacatcaaataagatggtaaacatcttggctataattaaaagtggatacattagactctttaactattggaaatgaaacttgctttcaattctatgcatttatgggatgtttggaaaaaatcctctgcaatttatttgttttgtatcaacaatagtttcaaacttatttaaagttaacattggccatgacttcatcaagcccatgtcacagatgctcattccctaaccagtcaaaaggagtagttgttgctaacacaaggactggggttagttagagatgtatttttttttcttttaagactaaaactgaaactctctcctgtctacttccatttcgcattccaccatggttgtaagtttcctgaggcctctgtagaagcagaaaactgcatagccccaagaaccatgagctggttaaacctcttttctttataaattacccagtctcaggtatgtctttatagcagtatgagaagaaaactaatactgtagacatttcctaaaactcttaaaatttaaagagcaagtcagtatacatgcatgctgaatctagtagtcattttttttcatagcacttatcatttgacatactatatattttatttgtccattttttgttctctccactcaaagttaagtcttcactgagggaaggatcttaattgactactatatctgcagaatttagaacaatgatggatatgtggcagccagttaataaatatttgttgaatgaataaataaactgatctttaagttgtcttcaatttgttaaagatatttttgttcatttaagttcccgtctgaatggagaagaaaagtcacctgagcctggttggttttagtaatgacaaatttccttttgggcttctactttatttgtttctgttgctctgtcaagaattagactttaaaaaaaattgaaaaaaggctttatatcaaaacatactttttaaaaacaatttcagactcctgacctcaggtgatccgtcagcctcagccttcaaccaacatagtgaaaccccgtctctactaaaaatacaaaaattagctaggcatgatgctgtgtgcctgtagtcccagctactcaggaggctgagccaggagaatcgcttaaactcaggaggtagaggttgcagtgagccaagattgcgccactgcactccagcctcagtggcagggcgagactctatctcaaaaaataagtaaataaaaataaaaataaataaataaataatacaaaaataaaaacgatttccacttttattttagattcaggggttacatgtgcagattttttacatggttatattgcatgatgctgaggtttgagatatgaatttctcacccaagtagtgagcatagtacccaatagctagtttttcaacccataccttccttcctcccttcccccttctacagtgcctgttgttccaatttttatatctacgtgcactcaatgtttagctcccacttataagtaagaacatacagtatttggttttctgttcctgcattaattcgattaggattatgacctccagctgcatgcatgttgctgcaaaggatatgatttcattcttttttatggctatgtgatattccatggcatatatgtaccacattttctttatccagtccactgttgaagggcaccccagttgattccatgtccttgttattgtgaatagcactgcgatgaacatatgagtgcatgtaacttccagaatctttaaggaacttaaatcgatacgcaaaaaaacaaccccattaaaaggtgggtaaaggatgtgaacagacacttctccaaagaagccattcaagcggccaagaaacatatttaaaaaatgctcataatcagtaattactagacaaatgcaaagcaaaaccacaatgagataccacgagattgcacatcagtcaaaatggctattattaaaaagtcaaaaaataacagatgctggcggggctgcagagaaaagagaacacttatacatagttggtaggaatgtaaattagttctgccactgtggaaatcagcttggagatttctcaactaatttaaaacagaactaccacttagcccagcaatcccattactgagtatctatccaaaggaaaataaatcattctaccaaagagaatgagctttttaaagagtttctcatctctcaatctaactagaaatcctgttaacatccagtgaatataataacatgtgcccggagctacacatgttggctggttgactgtgaattatggtcatttttgcactgcctcgttcactgctggcctccagaagcctaaatgttgatccatgtactttgaggaattacagacttgaagatgaagattctgtagtgtgtgaagcatagaaagagtgtagtgctaataattacactgctcattctagactagtttcttgtagcaaatcaggataagagttagtattcaccattttgtgaatgctagttcccaaaggtaaagattcaagtgattttaacagtggcaaaattgaaaaaaagctcaagtcctatttcttcgtttttataatgatgtataatatcatatgctaatatataatctatacaattttaattaatctatttcttcatccataataaggacttttgtatttataagtataatatcattgacaggtatatatagggctagaagtgttggaaatacagtttgtacccaaagcaagcttgaaaacttctgaaccatcacaaacagattcttgaatagagtttgtgtcctggggtctgtggagtctggaactgattgcccaactaggagttctctgcattaatttctgtgtaaaatacaagatttatgaaagtataagtaataaaatatgctaatttgaagcttaaaatatattattgaaactcagcagtaaccaaagcaacttagaaatgaaatcaataaataattttttctaagagaagtactttattaccgacatttaaaatatttctggtggatagtgataagaaaacaagatagacctttacttagttttcttattgcttttaaagtttttacagaccatgtgtactcttaagtctgtacttggagtagactgctcccaccactctgacttcctccgccaccactgactaagtactcatcttatgattagcaaaaatgaaggcattttttaaaagtgaacagggtcaaaatagccaacaggggaatattaatggtggtcactgagcttaagaagtcacttaagctacctggaatcactaaaattactgatatgattctgatatttacaaagaatccacatctctcctatggagaattgattgattggtcccaagtaaaagaagcagagagaatgggatgcttctcaactcttcatatcatccctcttctcttccaagaagtgcttgctttgagtttttatttatatttaaaatttaaaacaatgaaataatataaactgagagatgcatgtttttgttctgaaaatgcaaattttggttcatacatgaaatacttttaatgaatttgaacaatatttaaatagaattaaaacctggtatgtatatattgcttctatcatagagctctctttacttgcagggggcaaatcttgattcttttaagcaaatgaaggtcatgccatttccttttctagtgcttgttttagaaataagcacataatgcaattctagccaatgtcacttgaaagtctgacggaggtaccaggaaaaattcctctttttttttttttggtgggagataggggaatatactatcttctagtcctttagttccttttgggaatgtcataattagtttgtgcagacttcttgagggtatggtatattagtatgatagagctatttggatatcagcccaaaggattggtagtttagcaatacagggggaagaaaaaagaatctttggtagcatccttggaccactgaatcaaccttccctgggacttctctacctctgggctttgggttatatttggaccatctggagttagttcttctgttttagtctaaagcatcctaaatgagatgtttcttatgcttctaaatatactctttttaaccatgttccattttgtgtggacattgtaagggtaatatatacagacttaaaaagaatatgcctatgaattaggaagctttaagcaatggaaaccatttttcattcactgccattccactatggtagcaattcttcctatggtaattctgtttgttacttctcagtaataggaagaatcatcagtacaattgtgtaaggtacttttaatgaatacatatctatattctcaaaccgtatggcaacttctggaatgctttagatttccatcccaccttcataatctcttaaagagtctcctgtgccttactcactcaaccttacagtaggtattcatagtctggtaacacttttcttctaattgatccaatgtggtttggtggtcacagttatttataatagtggtaatcctcatactacaagagtaggcaatattgtatttaactacctcactattgagaaatccttaatatagggccatcaactttagttgtgaaattcctgtgtcatgtgatattactgggatcaattctcataggatgagatctaagaattaataagactgaaaggaaacatttagaatatgtaaatgacaggttttttgtctttgcaattgttaagaaactaaaaccagattttatatctattttgaaaggctgaaatgagttttatattatgacgtctattaacaattcaaagtgtctattttaaaatctttaacaatttcttaaaaaatatcttgtactgaaggataaaaatggctctgttattcatatatgattaagtactgcatttctcacttcaataagtgtaattccatataatttattatataaaccatcagaataatagaatccagttctatttgtgacatctctgcagttatcacaatgtattttgaaaacccaaagtaacaatgggcatttccattgagtgtgtttctttgcccataaaggaaacaaccaaatttacttctggcagaaactcatttgacacattctaaccagaatatattaaatcaattgtttgcttcatgtgggatgttaaaatgacatcccattttatccttccattttcttaacgtaataatgagcacattcaattcacaaacatttcaatttggttatgagctcacttcctccatactactcctaccacctccacttcaagtttagcataatcactctcttgatgatttatgcaatttctaaacattagcaaacataactaaccaaatataatgtattaataagtcttcaattatttttagaaagaattgcaatagcgttggcattgtcttacagaaatacacctgattttaaaagtagattttttttctgatttaccagacaagaatatccaaacaccaaactgtgtaaatatttcaaaaccatacatacaaaagtattacctaatttgtagtgacttatcaaggcagggaagtaggaacttaatattcattaagtcatttgacattcttaacaatgtgcagaagatcatgctttgtgcagagttcaaaatagataacaaatgccttcttctgtgggaaaaacatgaacatcaatgtgtctaaagggctattcagtacatgttttgtatgcatcattatttgtatgctttataataatcctcagagttaggcctattttatagatgagaagactgagcctcaaatgtaacttagccgaggacttatatacctgctaagttgcagaactggtatgtgcacccaattatctaagaatctaaagcccacatgcttttgtcacactacactctctttcttttgaaatttataatctgttatcaaggagggagaacttatataaagttcagagaaggtatatacacttatacacacacatacacacatatatacaaagttcaaagaaggtggagatgagtacaatatagacaaatgtaattgaagaagtttttgattcttatgagtattatacatattttaggggatctgtgttcttttcaatgtctatgaatttgaccatcttttcttctcacattcttccccatccgttcaccagtgacttcactcttctgtgaaagatgagatagaaacagctacttttctctaacagcataatttatctaattggtgtgatagcaaaagaatgaaaactattggcttgcaataggcagattaagatgtgaaacgcttgtgtcactggttgcccaatgactttgcccttcactgggtgaaaagtgaggagtaagaggaggaagaatgagaggcacatttttcttcttgggtccaaggaaatgctctaatccagttttaatgaaatttctgtcttatcactctctgacttttgagttcatttatcaatttgttaataacacagaaagaagaaatatgtgattcttttgtaacagggtagtccaacaatgaacagctttgggaaggatctggcttccctggggaaagtgttgcttccttaaagaatgctccctgtctagtaaataattgtaacttggcagtcactctcaaactatcaatttaacaagtaaactcacattttcctactctatgctggtggatatgaataatcaggaaggagacatagatgctggacttttcccctagatgctggacttttcccctaggagagaaagattcatttatgacctgcttttttttttggaaaagcagaagaaacccaaattataatccataaggtattcacctgagcacatgctgacttcatgtaagtatttttgtgcttatttcagtttacaacagtcagtgcaatctcacacggcatatatttctatattctttatttgtggctatttgaattattcatatgtttaatttttagtctctttatccttgattcttcaagattctggaaatgataatttgttcttttctcacctggtttatgatgatttcaaatgccctacttggtctcattgaatttagctataaatttcaaaattgaattgcagaaaacaatgtatactatttgaaatcaatcttggataagtcataattacccaaatatttattaatttgatgaatttctatatgccttttttggtcttcacagagagagtatcaattgctaagtgtttttagtcagtggctctttgtaaatgaaatacctaaattcacaatacttcatacaaaatgtgttacattagagtatttgcattaaagatgttttactctgcaataaaattttgtacaatctaacattcatgaaagagggaaataagtggattttgcaaagaatattcaccaagacctttgtttaatagaggggagaaaaagaaataattaaatactagcagaaaacagggttgcctctttgggaaatgtactcattcaggtagcccctggaacattgggtaagtatctcctcttgtctgggtaggtgacagtgtgtggagaagctaatgaatgcagggccaaattgcacctctttgtttggtggatttttctccatctccattagctctcgagaagaaaacacttatttgaccttttaagtagctagacttcaaaataattttagaatttgcatattttacgcatttttttctgaaccctgagcacatataatgcaaatatatagtcataattcttactctgttgccttgttctaaataatgaaagtattagagtcaactctttgagacaaggcccatcttacattgacatcccaaaaatgggaatagtgctccatagtaaacagtttaaaaatattatttggattataaaatgaattaattatataaagagaaaatgtgttcacaaatgtaattgggaataaatgtgttaaatattacatagaatctggttttaatccaaaaacgactcaaacttattaattcgatttgtattttaattcaaccatttagtttttttctttaaatatttcagagtgttagtaatatactagctggaagatgtagctagatggtaaattgtcagaatgaacatagaaatcttggaaaagacagacacagatgaaacaaatatatcttgcctggtccctgaatagggggacatgctattatcgaaagttttaagtagctgtgaattacttataatagcaagtactgaagattgtaatttatgttattatgttattaagcaaattgcctgacagaaaatattgcagtatattaaaacaacttctactgcatctaacataaattcaatagattaaaatatatactgtatatactgtaaataatacttaagcagaaatacctatagaatacaatatataaataggcacctttgtttcccttcacacttcatttaaaagcccagacccccttttaacaatatatcttgctaaaagcaatgtgccctttttggtgaaacaggtaccatataatgaagctcaaatctaatagtcataaattgacttactgttgttaatgcattagcaagtaataaatccaagtccatgccatcaatacaggaattctgttcctgccttaaaatttgaggacaatttaagtctacagagtttttcttggaataacagttaatgctgaaatgaaagtggcatgcaaatctcccaattcaggaagaaaaataatcacaatatgcttctgctgaatctaaacagccctacttcctttcacagtaccttgtgagcagtcctcttaggtgtcagtagtaggcctagtaaacattttttgtccaaggctgtccctatgtggccccacttatgctcacattatgacttcaggataataattaataaagcccactttcactctccaaagtgtctcggtctacataataaattacatagttattatattataggttaatgtaatacatatgaaattgtattaatgatatggattcattactaatgagatttaactaagaaagtttaaattatatggtaactttccatgaagtaatctgaattttaaaggtgcagataaatgctttattaaatgaaatgctttttgatattgtacagctttttccagaaactgcaagcttaaaaaaaaaaaagccattggatatgaaaaaagaagcattcttgagaaaattccctaaggagaatttattttttcttaaaaaggggctttatttgaggtgtcaagctaagattgtgctccttcccacctggagaataacattcgacatcaaatatttggccagaattttgctatagacattagcaagtcattcctttcatctgtgattgtatacgaagtgttagctctagagtgtgagctgccatccatcagagacaacgtttgcttctcctgtgtaacaatgtcacaacactgtaagttcaataacattgcctaagtagtcaggcaatgaaaccaatatgcatgaaatgctatcattgtcgttggcttaaaggcaaaatatgttgaaccaaggctattttcttattcaattaacatttacagaaaacctattatgtgccacgcatcttgacacaaattttttatttgttcctaataacaacctgtgaggtatgtgttactttccagatggggaaatagaaagccagagagattaagtgacttttttaaagttacttagctggtaattgatggaaggttgattcaaatcaaggctgattgattcaacatgtgagctctttccgccccatttctgcttacatctctggctccagactttgatgtttggccaagaagagacttttcagagtggtagaaagccatttcctactaatctaaaataaggattcctgcatggagataaaattgaatattattttttcctattatttttgatagccatttcctactattctaaaataagaatccctgcatggagataaaattgaatatttttttcctattatttttgaaacatcttcaacactttccttagggaaaaaaagtgggtagacagcatcactcgtatctttttttttttttcttctatcatctgcccttcacaattcaatggaggaaactgtacatttcagtgggaagattctattattctactactgcaagacagccttatcttctgcatatcatttatttttgaagctgtaaactggctgaattctttagtctttccaactttaaaactagaaattttgctccgaaatgaaagagtatcaggaatacaaaggagaacaggaaaatctgagacttttttcatttaagatcaatgaattatttggttatacagatatttgaagtatagttaacagatatcaaaaagaagtcctgggttgcattcagtcatggctgccacagatgtcaaaacttcacatgtgggatgaaagattgtccacagtatggaacaagagagtttgcagtttttaaggattctgcagtcttactactaagcaaaagcctggcattttagatctcctatagctgttgagcagaattgaacagtcattcttgaatcatatttactacattgctagctgatgactaaagtaaaggctcaaaacttcagctgtatctaggaaggttttgggatcctcagttccccgaactttttgaactacaaagtgtatattattcccatccaccagaatttagctctggggagacaaactctggagaaggagttttcatgaaatagattttccatgtgaattacttgaactgctgtataaagaactcagaaaaaaaaatgtgtatgcatacaaaccatacattttaaaaacctagtgactactgatcatggggcgagaacacagaaagacagataagagaggtctataggcttcccatgtatacctcaacacctggcctctgggccctgtgatgagaaggctgaaacacaaaggaatctgaacagggacactgcatacaaatactgaattatatgctacataaaggttttaaaatgcaccaggcctgggaagaaccccaactagaatacaaactgtagcaaatgtatctaactgtattaaaaatgagtaacagaacactacaggaggtgtaaaagaagaactaacttattttggaaaacaatattttgattgaatagtatgaggctaaagacaaaaagaactgcacacaaataatatactttccttagtaaatttgttcccaaatgggtacagattcatatttcagaagctattttctttgtatgctagggttgaaaaaaatacatgcatatattgaagaaaatgagagtcagttttctctttgtctataatagaaaagttatatataagaaaagggatagctagaataaaccctgtagtattggattggaattgtagatatcaatatgaattcatcatttttaaagataaatactgacataaacttagacatatgtgtatgcaataaccagtataatatatgtattctgaaaccatgttcactgacaggtactaaaagtagtgacactctgttagtagtaagcacacctgtcacccagatttttgtttctaatacctttatctaataaaaggaaccagaactccttggagatatagttgattccaaggctggcacagaaaatatacaagataagactttagccccatgcagcagcaggaagtacgacagtgctcaaaaaagaatagggcatgttgaaagggcacaggagccaaatggaaaagatcccaatgcccaaagctagaaaaatttacaaaaagaaaaaatgtaattggattataatccatagaataaagtaaatatctgtggtgccatagtgataaagataagtatttgagtagatacataaatgtaggagaagaggcagctcttctttagaaaaagattccaattaataagtaaagaaggaatgagggaaatggaaaatcaccattagaacaccactaatgaatgctgaaattgttgggtaaaagtttgaggagaaataatatttgcatttgaaagtaactcttacaaaatatttattaattaaaaaagaaatatagtaactttagagtagagaaaactgggagacaccacttttagaaagtgatccaggtcaacataaccaataattagatacattgacatcatacatgatatacatatattgacatgatacactgagaggggcatatcacttctgtagtattcttgccaaaaatgcataatctcaatctaatcatgagaaacatcaaatagaaccaaattgatggaaattctacaaaatagctgaccaggactcttcagaagtgtctgttgtatctgatgtaacagatcagaggaaaccataaagacatcacaactaaatgagatgtgagatcctgactaggactctggaacataaacataacattaaaagaaaaattggtgaaatttgaaaaatgtctgtaatttaattaatagtattgtaccaatgttaacttcttggttttgaccattaaagcaactgtatttttctatttttataacttttctgtaagtaatgttcttacaaaacaagaagtttttaaaaattgaaataaaatgtactagaatattgagaatagctatctttggaaagtgaaagtgcagacgatttttattttttccttaattttgttttccaaaatctctacaatgagcatgtgatatttagaaaatgcattactatttttatttttggccaggaaatcccttatgtatggctttagttgtaaaaaaattaacaaatcgtgttttaattttaaaagataatgcaaaaatgtttatatgacgtattagaaagtgtctgtaagctttaatagcaaaggacattccacaccagttaatgctgttttttgcatagatacttaaattgtcattaagtcatcctttatgttttaattacaagcatactgcttaccatttttgaaagccgagatgatccagatataatgggtataggtggaaaatgctactttctcttgagtaattgaagaatgtcatgatgttctcttttaatatcatgctcaatcacacctgccagataacgatttttaattttcaaaatattatgagactatcaaatgtacttgttaaaaacttacttctttcttggaagatttggaaggcttcagagtcattattttgacatgtcatgatataattctgcagctgtgatagatggcactgaaagtaagcctccttctttttaagcttctggacaaatgctgaggaacagtcaaaattagcagaagtaggctttcactgctactggtgaaatccctggaacctgaaggatccactgtaaaaacagatggagatcttagtttctaaataatttgaaaaaacaaaacaaaacaacatttaaagtagaagtaaatgtactctcagaagagttacagaaaaactgagcaggtattcagagaattaatggaaggcttatgtgatagaaagctttctaagtcattattttatcctgcttccctccaaccccttcacatccagaactacttttcacaggatacattttaaagatatctacttattgtgtgtgtgtgtgtgtgtgtgtgtgtaaacatacattcagcatctgcaaagcacaataaagcaaaacacaataaaatgaagtacatgtactcacttaaaatggcacaatgaccttttaacataagaatgtttggtattgtcatttttatttaaactagtcaagcttgaacgccggcaggatctctgaacaatagttctcaggtaaataaaaaatgtaattttattgttctttaaaaatagcaatgaacatagcattacagtgctgcttttttgcctcatatttcatctcaccttgaccacatgtggttaataaaagagtacttattattattttttaaattttatttcaatcgttttcggagaatagatggtgtttggatatacgcataagtcttttagtggtgatttctgagattttggtgcacccattacctgagcagcatacactgtacccaatgtgtagtcttttatcccttactaccctcccacactttcccatgagtctccaaagtccgttatatcattcttatgcctttgcgtccttctggcttagttctcacttataagtgagaagagaagatatttggtttaacatttgtgacttacttcacttacaataacagtctctgactccatccaggttcctgcgaatgcccttattttgttcccttttatggctgagatatatctatatctatctatatctatatctcaatcacattttctttggatactccaacctgagctcttgtatcttccttgttagtcagtcataatctggatgaagtttcgtctactgtgcacagatctttcagcatcaaagatgttggaggggctgggtacggtggctcatgcttgtaatctcagcactttgggaagtcgaggcaggcagattacttgaggccaggagtttgagatcagcctggccatcgtggtgaaaccctgtctctactatacatatgcagaattagcagggcatggggcaggcacctctagttttttgcctgccagtctaagtcactatttagccttcattggctttgttacagaatgcattctaattagataaaccccaaacagatggtacagattacgggtagtagctctgtataagtgaaactaatttgagaaaaaataaaaaattggtttataaatgaatcctcatattttaaattatttacttaataggatttaaggattagaataaaaaccctgtactttgaccatttactcacttctatctggcacaagattcagacctcagctctccgtttctctctctctagctcttattcttggccacgggaccaaccctcacaggggcactctatgcagaagcttccttcctaaattggaactcccactttgaccactctcctttgtaaacagaaataaaactgaattctgcatgttgtcccagaggccagatgcttgtgtcaatcttccattcttccagcttgaaaacatatctgacactttctttaatgaccaccccatcatatttattgaccagaacctgtggagtctttctttgtgacggtttcattgaatcctttacctgattatatgccacttgcccacttaggaaccttcaattcccctacgtgtacaggctcaaattcaagctccttactagcatctgaggccataatctaatgtttcttttacttaaactctctgtcctagactggttgttattgtctcaaaatgtggcatctgcaactttgtttcttttttttttttccagacagggtgtcactctgttgcccaggttggagtgcagtggcatgattggcttaccacagcctccacctctgaggctaaatgatcctcccatctctcagcctccccatagctgggactaaaggcatgtaccatgatgcccggttaattttgtatttttttgtcgagaggggttttgctatgtggcccagtctggtctggagctcctgggctcaagcaatctgcccaccttggcctcccaaagtgctggcattataggagtgagccactgtgcctggcctgcaatctcatttttaagtctttgctcagatcagcacttccacttggaaagatctctctggttctcttcatctatctccttcctgcatttcctatacaatattgcccacgtttcatttcccccttgatgcatttctcattacattatcatacattgttagagtttctgaactctgtaagaatttgcctttactagtctgttggcttgtttgactattttcatatgcttcctttttctatttaatatcttgtttaaattttcagtttatagattacttaaagtaaaaaactatgtgcccatttcccaagttttagtaatttaaaaattactgtaatatgcaaacttacatcatgaaaattaggatatcagtcagagtttgatgttagaaaaaatggctttgacaaacttttacagaaaatgaatctgtttgaagggagtccacacattcattctggaagcttggagatcaagaataaaaaatagataaggacaaatgaaggttggccagagaataagaagtatagctggtcatggttcaagagcacccaatcactggagctgccactagtggacacttaagctactgtcttctcgtgtctaccagactgttcagcactaaatgctcaaggcctctgccactggatgccacacctatccctgcaaaataattgatgctgctgcttctgccactgatagtttttcagattcctgaatctttggaagtccagttggtggtatccaattggtcaagtctgcattctgagcctacatctggctttcaggaagacaggaagggagtatcttcaatccctttggcttctggagtgggaagggatacacacacaactagggaatgtctcataataggaaggattgtctggatgctgggtacataaaaataaccaatgtctaacacacaggcctagctgtgccactgttcagtgcaatggcagggatttaccaccaacttaaaatgttttatacatacttttgtataaaagtatatttttatttcctgaaagcagtgacattttcccataagtgtcatatcataaattagtgaactttaacattctatcctaatttgcataaccttgtctgcctttaaacatgactgcaagatgggaatggtagtgtcagcaagaaccttccttctccccatgacacatcagcaaccacatatgaaccaattctttttgtgagaacttcagaaactaactgagggactcctgcactccagcaagcatgagaccggcacattgaagccagtaagaaaattcgactctctttctcaccataatccccacccccagcatactgccatatgattgggaggaagtttccatctcccagcttctccctggggagttaaggaaaggactggatcatatatccaatgttctaattcttctgagggttgctcagggaactggcttctgtctcactggccttaggttctgactagactcaatgtactctagatgctgggagccactgagaaagaacaaaaacagtgatttagtgcagcccacatgcacttgccatcgcccctccacctggcttggtgcagagcaagtggtcaaaaaaacccagattccagcttctccctggggagggaaagagttgggccatgtgagcaacattccaaattttcctacctacaagaaatagataaattcctagaaacctacagtctaccaatactgaatcatgaagaaatggaaaacctgaacagatctataacttgtaaagagattgaatcaagaatcagaaatctcccaacaaagaaaagcccaggaccagatggcttcactggtgaactctaccaacatttaaagaattaatgtcaatccttctcaaactccctcagaaaactgaataggaggaaggcttccaaatccattttgcaggaccagcattatcctgacaccaaagcccaagacactattttttaacaacaacaacaacaaacaactataggccaataatcctgaagatcatagatgcaaaatttctcaccaaaaacctagcaaattaaatttaacagcatattaaaagaaccatacaccaggatcaagtgaaatttatccttgggattcaagggtggttcaacatacaaaaatcaattaacctgatacacagtattaccaagatgaaggataaaaatcacatgagaaaagcatttgataaaatttaacacacttccataataactctcaaagaactagcagtagaaataaattgcttcaacataataaaggccatacatggaaagcccacagccagcattatattcaatgggaaaagttgaaatattttcctttaggacccagaacaaggccaggatacccaccatcgccacttctattcaacatagtactggaagtcctagcgagagcaatcaggcaaggaaaaatttttaaacgcatccatatcagaaaggaagaagtaaaactgtctgtgtttgctgatgatgtgatcttatatatgttggagttctcattttaccatttttttttctttgaagtgaaaggcaaagaagtttttattgcaaagcgaaagtacacaagagttcaagtgtaattgggaaagtcgccatttacgtatcttagtatcacttttagttttctgttttttgtctctgggctttattttagacagtttcttcaattctgccatctggagatttccccttgtttcatttattcctatatgaattttttgttaatatttgtagtattttatctgtcatttctatgtgtttgctgttgggggtgtttctacacaaattcagcctacctttgtaaatttctcctaactgcttttcacagtgaccaactcttcctggtctgcccaggattttcccagtttcagcactggaagtctcatgccctgggaaatccctcagtcctctacagactgggatgatttgtcattgaattgctttttatcattccacattgtgagagaagcaaaaggtcattaattgtttacattacttcagtagtgggttgtctatgaattcttataaatagcaaaaagctatcatgttctcccaagtaaaatcttttccaagtactgttttggcccacacttcctgaaaaacaaagcctgattcaaaagcttattgggaagtaaatttggggaaaacagcagcaaggcagagaagaaaggggaccaaaatgcaaagagagcatactacttaagctgtccacagcctcaaaggaaaaacagtaggttgctgattctcatataaattctccagaagggcaattcctggaattcaagtaatgtatcagctggctgctgctgtctctttgtctttcattggttgaagtcctcctaggagtcattaaatccattgtacttccaggtagcattcccgggcagccactggagaagtaacaccttctcttggtccaatctggtgatggagcagacattgcagtcagtagtgccaatgggaactggtccaagggtgtgcatggcagtggcagaagtcacggcattaaactataagaccagtgggcagtgccaggatccttccagctgggaagcaaagaaagcggaggattgtggggagagtggataggcgaagctgagtagctctggtatgacacagagtctggatctgatacagatattaaataaaagctactccctcatcccaccacacacctatttgcacctgctttattgcttaattgtagtgatgaatgtaaacatctttagctatgtcataatctgctaaaggcaggattttatatgtatttttctatgatatctagtagactattggcagaagcttaataaatattttatgaaatcatggcacactgcttgaaatatagatatatagatcagtctataattatgaagctcattgtactatgtgactttctagcaaatagaaacatagtataagatgatagttccaatggtcttggaagccaggaattctctcactctgccatcccattataattgacaactctcagtcataaacaaatttacctatctgggtgtctagaactctgtaatttggtgattctggttcagctgccccttactttatgaacttatttgctcattcagtccattgagtttctactatgtgccagatactatgttgggcttggataataaagattaaatgtgtatacatcctgtccttgccctcaagagactgaaggtatggttgggaatttattctccacctggaattctccgtgtctttgtgcccatcaaatgtccttcttcttgtaaggacattagtccttggattagagctcaccctaatccagtgtggcttcatcttaactagattatatctccaaagacactatttccaaataaggtcacattttgaggttctgggtacacaagaaataataataattctgaacaaataatacagaattttgtcccttatctccaagaaaggggatagttttgcttgtttgttcaaattgtgcttaatactatcaacacctctacatatttcagtaagaatagttatttttattctgcttgagaaaagagtatgtacatttctcataatacgaaggttctgatgttctttagcactgacgtaattgaccctacactagggaaagaacagggcagataaggcattcttcagacaattccctcttctagatccaaagttgatcctgatgccaaaaaatcagtaccagaagaccagaggtggcccaggccaggaaataagagagtctgggagattcccattttagcattcactcaatgattaaggcatgacccatggcttgttgattatttttgacctgtcattgtctattttcctatcactgatagaaaaaggtatttggtgtcacattattcttcccaattctagttggaacacatcctccctttcacttcttcatggagtacgtctctattaattatttcttcatgccatgacaagatcaactcttgtctttaaaatattattgcattggtggttcacctcaatatattgaattccctaaaaagacatgaactggtctctgattcatgggggaaaatctccaaaagttgcaatattttaggggattaaaatttataataattcctctgtgtttaaggacacataacatgttttctgcatcaatggttaagtttgatatacattcatggacctaaaaaaattttaggaccaaattaagatgagccatgactctgtacaaaattgtagtgggaaaaaaatgcttacagaattacactatatcaattggaaagggttagtgtcttattagtggctcctcatttcagaatattttccttgatttcagcctcattcaggttgctgcttctactaatctgggtgcattatttacccaattcaattcttcagtcatgcattgcaaaaaagaaaaaaaaaggaaaagaaataaagtcttttgagcaaatattccctagaatatccacagagcttgactgcattggcaatagctggcacttaggagaatgtggtagccagagccctgtattttgctgtctagaatctcactcttgtgcatctggattttcatcccaggcactcctaggcaacccatgatgctgcaatgactgatgtcttagtttcctagggactctaacaaattggtagctgaaaacaacagaaattgattatcccacaattcaggaggctagaacttcaaaatcaagatgttggcaaggccatgctctttctgagagctcatgggtaggatcctttcttgccttctcctagcttcaggtggttgctggcaatccttggtgttgctttgcttgtaggcatattgctcaatctctgcctctgtctccacagggcattttctgtgtctctgtgcccatcaaatgtccttcctcttgtaaggacattagtcattgtattagggctcaccctaacccagtgtggcttgatcttacctagattatatctgcaatgatgctatttccaaataaggtcatattttgaggttctgggtgtacatgaatctttaggaactattattcaactcagtacatttgagaagagttggtggacaactacgtcaaaccttttagtactgttacaatgtcattctgccaaataggtgaacattaattgtaagttatttgagatgaaattccttctactgaagaaggccactttctttcctggaaattggatgaaccagaaacaaagataaatgtcgtgggttaaaaaaaaaaatgttgtaattaggtggcaaaacagcactgattagcttatcattctttccttttgtgcttcagtatgcctacttgtataatgaactacagaatagcctccagattgtgtttgcaaatgcttgatggaaatttaaatcagagcactataaagcattgcgtgatttaaaaaaaagtcttcaaagaaaattcagatataaatatggctaaatgaataaatatttctccctagaaaacttagtcatgtattagtactataatcctcacaggacaaaagaaaatgtcagatatcatggagttacacagatttctttatgtctagtacagtctctagccaaattcaactgctgatttacaaatcaaattcagaagctaggagattaaaatagtttgctttttcagaagctataaagaatatatattctcactctatattttgaaaattcagaatttttaatcaggctcaattcctagcaaaacagtcttactatcccattctctcacctctatatctctgccctcccccacactgtctctgctaccttccctaaccatgctcccaactccagaaagttagaaatatggctactgttgctggtcctctttcaacttcataatctaccttgagtctgggaagactttctataaagtttcatgctgagctacaaaaacaatgctgtgtgtgattaagaatgcaggctttggagacagactgcctgaattccaaactttatgtgactttcggttgtttaatggctctgggccagaattttatgtgtaacataaggctattactaatactcaccttaaggatattatgcaggttaaatgagctaggttacataaagtgttcagaactgtctctcacccaataaatggttattattattaatctgtgtgatgctggtatataacagaataattcaaactaaataatgcattcaaactaaactattcaaactaaatagtggagagttcatattcaaactaaactgtattgtaatgtattcaaactatattgtaatgtattcaaactgtattgtaatgtattcaaactaaactgtgttcaaaccaaataatggagagttttaagtacagaacatcacctcatatacttaatataaatgtgcttttaacagagcaatgatccagctcttgtgaatggtaggttgagctcagtggaataggacccaatgaatatggacactccaactaaatttcaggttcagattgtcccacaataagacacaatcattcaaacaacaccctccaagctgataagcaattaagggatcaaggcagaaacacacagccaaggacctagagcatcttagagttggtggttgtaaagttagaaacggaccacagtggtcctcctgtgatactgagatttaaatgtttttatcttttttcctgctcccctcaccccattcttctttccttaccatttctgttatcgtctcagctaaagttaatggttagaaataatgagagttgatggtagccagaccagaaaaacaaatctgttcggtttttgttattcgacctatgtgcatcctcttgattcaattagttctcaagtatctctcaattatacctgtgaacatgtgcaggacagaaacttgaatttataaaataatgtttgaattaaatggtatctcatttgcaattcaaaattctataatccagggaatagactggaaagttttagctctgaaaatccatggtagacctaaagagctgagtttctaagttgctaatatttatcacttgcctttcacaaatgagaatggattgcctgttctgaaagttggaaacaaaaactcttttctctgattcccttatatcagcataacaaacatgaagaaaggtaatgactgcatcatcaatggcagcaaaatgtgaactacccacagatactaagctaactaggtgtgcctaattgccaacagtagggatatgccccgcctgtcacttgaatacgttcttaatttatgtgccactgaaattccctggtaagatgtcaccacttacattgtgggctaagtggattacacatcttgctgtagggctttgagtgaaatgcagacttcttggctaaggtcaacaatggaaaacatatataatggtggtcccatcagattaactggagctgaaaaattcctatcccctagtgatgttgtagccattgtaacattgcaaaaattcctataatctagtgatgtagctattgtaacatcacagtgcaatgcattaccttttctatgattagatgtgttcagatacacaaatacttcccactgtgttacaattgcctacactattccgtatagtacatgctatacaggtttgtagcctggaagcaatggggtacacctcatagcctaagtgtacagtagaacataccatgtaggtttgtgtacgcacactctaggatgttctcataaggacaaaatcaatcacctaacaatgcatttctcagaatgtgtttctgaaacagacatagaaaaaaaaaaaagggtttttttgtttttgttttttgtttttttaatctaggctttcaggaatgaaatgcctaactcaccggatcgacttgggtcagagatactgataaacctctcatgccttgaaattgcagtggaaagcaagttcagccacttgccgcttgagaagccgaatacacaagaggtgaggtatagtggaaggaaagcagctttattaatcaaatgccggcagttgaggaaatggctaggtttatgcctctacaaaaccatttcaaatttttgggctgactgtaggggtttaaaaagagaaacttgcaggagttgtgcaaggtgcagttctgcatgtcttgttccaatggctatcttgaattattgtctacctggacagaatccaagctggcatcatcttcactgtggctgggtcatagattatcccctctgaggtaatttctaggtgggggagagttctacaactgggtttccgtatctggtttgcttctagagtagccccgggagcttctaaacaagcatatcattgaataagtgtgcatggtgctagggagtgtctggtgggaaagggagagaaacagagttgtaaagtgcatttcaaggctatattctgagtttagagaaaaaaagtttttaagtgcattttaaagctaagatacttgattacaaaatgtgaattttgatggaagaggaagaatattaaacagctttcctcagttgttcttccacttgtgcctaagtggcatccatacttgaccctgtagacatggcattcaattttaactcatcttccctcagctttaaagtagcgaaaatcataagaagaattttaatttagcaataatttttggtccccaattaatctaatggctaaaatattgtacctctaatacttaaagaagctcagctagtaagtaaacttggtatgttattaatcaagccatatatttttattaggggccttttatggtctcagcactggaattttagtgagaggtgattaaaaagatatgttctctagcagaaaagatgaaaaccaaagcatcaatttattcagcaaacacttgttgggatctactactgtgccaagtgcttaatggaaaacacaggtgtttaacataaggtcctttatgttgatacacaccaaatatgtctttcctaaatgaattttatgttctttattattaggaattcatatctctaaaagaattgaaacactgtttatgtgcataggccatcaaacaccacagagatatcttttgaagacgttaacagtttaaaattcctcactggtgaagaaaaacatgagttttacatagcagatgctacagtttaagatggatgtatgtgtataacctctctagggaagtactagaacaaaaatttaagtcatgagtaaatatgcatgcttatattaagaaaacccatcttgagtttacctggcatggattagtaccagtaggaattgtttaattagtaattaattaaattttctgaaaacatacatcatttcattactagaaacaagagcaaaactgcatgttgaataaagcaacactcgtacacttaattaaaaagcaaataagttaacatataatattttcatactgcccatctgcccttagaaggtctacatcctccggaaaaagctgaatataatttaggtaaaagactatattaatacaaaaaggactgaagtttaactttctcctgtctctccttccttccttttcatttttgccaacacacatttcacttatattaaaacttattccaccacaacttccttgtgattaattctaagacacacagtggtagaaaaaagttaagcaaatatatatataaacatataaatatatatatatacatatataaaagatatataaatatataaaatatatatatatatactgttgttgttgttgtttgtttttttgagacggagtcactctgtcacccaggctggagtgcagtggtgcgatctcggctcactgcaacctctgcctcctgggttcaagcagttctcctgtctcagcctcccgagtagctgggattacagatgcccgccaccacgcctggctaatttttgtatttttagtagacacggggtttcatcatgttggccagactggtcttgaactactgacctcaagtgatccatctacctcggccttccaaagtgctgggattacaggcgtaagccaccgtgccaggccgaagcaagtatattaaaatcactcttaaattcaaatattagaatgctgttattctatgaaatagatttgtagtttcttttttaaaaaaaaataaatttaagttttttaaagtttagagagaggattctgtgaaactgccctagggtggttgctagccatgcccaaaaggtagattcagattacactgtgtgtaagtgcaagtgaactaaactttgcaatttgtcttgtcccatctgttacaaacttcacagtagggagcctggcattgtcagttgccttaagtgaccggttgtgaatgcaaacaaaatttgtgtgtacttttctagttttttgctagagtcaaaaatacatcacgttcttggtgctcagttttcactgagcctgtggaaatagggtttatggcaattttgaagacaaaagagtgtgtaaccaatagaaagaatgttttctatatccccattgatctggtttaaaatgctctctgtgtgaatctaaaactattttagaaatagtttaaaattaaatttaaattatttagccatgagaaataaatgcagacaaagagtttaaggaagctgactagctcataccattcagaagtttgtctttcaagcagtaacctagaagataatccattaattatgaaaataattttaatcatgtggtatggatatctttaatagacatcatcataacatatttggactccttgaaattgtcttgtgtgtgaacaaaacaaactcaatttgccttttacagattttaaataattttgaaataagttaaatataaatatatattaatgtaaaattaacatattaaaagatctttgaagaaactaagcattaaatctgtgtataatcagactaaagcattttattccagtaacttttctgaaatacaaattacctcacataaaactcatgttctactttccttaaaaataagacactttatcttatgtgctttaaagcaaatggattattaaataatgtaaaagcttaataaattaccagctggtcgaactatttattaattaatgagataaacttgaggagaaagcaataattataaatattcttttaaaatgtaaattgatgacctgacaaggtttttcattataaatatattaatatctgttgtatatagacatttttatgctatgtatttcattttctcctgctcatttctaaattaattacaggcattagagaagctataaatactaaaagtcagattcagctgtctgctttcaagtgtatcacaccaaaatcatcgatctttgagaaaacatagtaggacaattctttacataattgtataattataacccatgttgaaattagcaaagtcaaaagaaaacattaaacagtttttcttttctaaatgtcataaagactttgtagaatacttatatttataatgggtaatgtggttacattttgcattacacttcagctactaatgttataaatgattaagcttgaatgaattttggagtctcacatctagtatatgcttgttttttttttcggtcagaaacattttatgcttatttctttctcttcattttgaagattaaggaaagattactttaagacttgaacttggcactttgcatatctctttggttcatgcaatagtctttccaaggcttgtgaaaaattcttctaaaaggacaaggtgaattacttggctaagatacagatgccaatatatatacaaagagaacaaagctctatgaaatgtacagaaggatcctgctctcctgcttgaacatttaactgaaaggaaaagaacggaggaagccagagtaacaataaccacatgccttttccataaatgattcttgcacaggatttcaaataccagaagatggaaggttaataaatgtaggaagattttatccatacaagttgagaaaaagttaacatatgtaaaatatggaaatgatcttctaagtgtctattgcctttgaaaggtatcattctcaagttaattcaccagttaatttcatgtcatctgaagtttctctattaaaatttaagtaagagattctcatttgggaaacaacttctaaatatttcagaaacacttaccaacataaccacagtgtactgaatttagcttgtaccaactcaagagagctaattgtgcatgtatattcacaactcttgtgtttcagtgctgtcacaatagtgcttggaatcgagtgtggtgggagattttacaacacagaaataaaaaattactatttttaaatattttatttaattattcctatcagcctatgagtatatttctatatttttatacaatttttattcctgttttacaaacagagaaactgagatggagaggtcatcagcccaaagtcatagtgtgaatggtggagccaggatttatgctcaggcagtgtaacttcatagcctttggtcttagccacaatgctactctgcttcccaataaatatttagtcaaagtttattcatcagtatagaatgatgacattatttattatttattgactgcataaacccaaattatcaaacactttttcaacattctctcaaagaagtaaattcaatatatctaacttgaaatttaggagcattaaaaaattaggaaaactattttatagaaccagagtttttcatggggacaggtgctagggttctctgctccagaattctgatgcttaaaatgttgcatatttgttttagatggaaaaagagggtgctggcagaaggatccctggttgggcagcgacatgccagtgtgtccagaggagttccctgcctgccaggaatctcagcagacacagtgatgtgaaggagcaagacaaaatgccaggtagagacctactttaaatagtacttagaaataaaaatcataagaaatgttgaaccatgcagtgatgagaatcacttttataccacccaaaatcccttttcctgaaatctctatctgcttgatgatactgtccacattaaaatttttaaatattttacaaagtactttcataaaatagctaaacaatcctgaaatccatccttctcttgccatcattggttttcctaaggctttgatatcctctacttccattgttgattctcctgttttcatttttaagtcattttctttggccttctgctcttcccgtttttcacaactttaattattgacaatgatttctgaatctcccgtgagctctggtgtcacatacttgacacaaagtacagttaaaaacttcttgaatgaatgagtcactctccaattgcctgatgaaaatacctacttggaggtatttcatcaccttgaagcctgaaaacaacctattgtcttgtccttaaaataactaccttttctgagaatttctgttaatggtagtgagaaccaacatttattgagtgattatcgcataccaggcactttacaacatattatctacttctcacaactatcctatgaaatagatggtgtaatgaagaaatcaaggacaaaagcagtgagcaagttaaggaatagagatatgaacccaggtcatctaactcaaaccagtgcctctcccatcacacgtcaggcttatctgtttaagtcccttaaccacactcagttccggtggttttaacctgtcaggtagaggcccaaataatgacgaatgaagccagaaaaaatagaacccaaactgacaggttattagggatgaacaaaaagaattgaaaactcagtaaaatccaagaaaatacattcataacccaaaatataaagaattaaagagatttttgaaatagagtcaagatttgcttatttgtttgaatcaagttccaacaatacaaatattaactttgcttgatttgggttggaatctgagttgtcaggaccatttctcagattctactgagaatgtaaaagagacttaaagaagtaacacagtcgactaatatattttatttaaaaatttacttttgaagcctataaatggataaattccaaaatacagaatatttaacaatatttaatattttttactcaacagtctgcctttgtgtttttctttccataaacaaatacactggattaaagcaataatactcttatcttcaagttcaatgcctgagtttcttgcatactatttccatttaaagttcagtaattacttaacttcacattattctgtcacaaatgataaatgtgctacctatgtagtaaaaatcataaaactattataagccaagtcaagagaattcataaagttaatatgaaataataactatactgatacacatgtgcaatgggccctaccagaaatatgccaaaataacaagttttatttaaagaatgaggtctttgggcagaaagaaatgaggggtcattatcatcaaaaattattaggaagattgtaggtaaaaagaaatcagcctacaattttaactaaataaaggaggagaagggagtatatcattacagttgatgcagttaggaaaattcaattaccattttaccacaaactggctgactacttcaagagctcagagtcaggctctccaggcattctgttactctcccactaagtttccttacatgggacataaacctgcatttatgattacaacaaaatattataatgctatttaatctgacagttggcaaacaatagaaaaacaaactggaaattagtggagccacaccctctcactacccctgaaaataggggctaaaatgagtcattaagaaacagtattcaaagaccactgtattaactaatgtgatttataaaataagcaaaattcagcaattttcaatggaaaatgccacagtatttgaacactaggaatgttttgatgctgatttttatcaaagtggtactgcaagccattaagttggaacaaattccaaattcacaattacatgcatcacctcagtttaataatccaataaatgataaaaaagacaaataaagaaaacagcatcatatagcacagcagctttgtttggctccctctggataaaatcttcagtttgcccatagttttacctagaaatccagttgtggaatcaaattgtgaatcctatcagagataaaggcaaataaaatatcacagttagattctaagagtctacatatgcatatccaagtaattgaataactgttaccatagtacatttgtaatgacagttttgtgtttaatcaattcaggagcctgttgataaccttggataatcagcctgatttctccatgcaaaatacagtaatactctcagcgaataaaaagctctttcattgtccaataaacacttctttcagctccacagagtaattcaacaactcaaaactatttaggtgttattccaattatgtggataaaaaaaattaacaataaatgtaagtactttgtgcattatcacacagatttttttccccactttttgttgtgccattgctctccaaggtcaaatggttgactgctacccaagtagaggatttcatccaaaatgtaatacggttagcagttaaatgtacttttatttacttatttatttatttagagacggagtctcgctcgttgcccaggctggagtgcagtggtgcaatctcagctcactgcaatctctgcctcccaggttcaagtgattctcctgcctcagcctcccaagtagctgggactacaggcgcacgccaccacgcccagctaatttttttgtatttttagtagagatggggtttcaccatgttggccagggtggtcttgaactactgacctcaggtaatccgcccacctcatcctcccaaaatgttgggagtataggcgtgagctaccatgctaggccttggacctttacttttaatatccttttgtttagacagctgactttgaagtagagtctattaagttaagagaatatcatatagaggtagtaaaatgtgataaggactataaatatggatggggaaaaactaacgtattaaaacatagctggaaaatcctaaagatgagagaggcttaggtagggactagaaatattacacatactttcatagaaattataatatcctgagatgtaaaagccctggcataataataaatatcctttgtatagctcagtgtctatgtggctcatatactttagatctatggatcttcaccatggttatgcatcagaatcaccggagatgctttttcatggttatgcatcagaatcaccagagatgcttttttcaaaatatttacatctagatccctcctcacgaaattctaaatcagtatatttaaagacagaatcaggcatatacatttttaaagaggtccctagcttattatagcgcacaagcttagcaagaacattgcttttgatgccaaattcatttttgaatagcacaattttaaaagcacatggaaccagagaaggttcagagaagcttgacattcaagataaacgttaacaaatggaaggggactctaacaagaaaaggtatatgttgttagagagaaaaggctctgggctgttcaaatgtatgagcacttttttcataagtgatccttaggaaatcaagcaaaagagtaagtatccattaagtgaacgacatttagttggttggatatcaagtgccttttgattgcttggttaataaattactagtagtctctactattgagacttctaagactactcaaaatagtcatttgtcttgtttttaacaatcattctaaaaacaggattaaagatatattggcttccacttgttcctcccacttacatgcgtaagacgagatgaaaaatgcaaaagcatggcaaaataaaccttatagttattccaaacacattagatacaaatggacgggaatcaaggacttacgatctctgtatttcaaaatgaataaaagttgaaattctattatttgcgaatattagatcaaatttcttaaagttaaaatcataaccacttaccatttcagctaataatttattctgggttttaacttcatggcctatttcaatggaaagctataaagaagaaggtatacacaggattactcacataaaagtattcaagtgttataaagtaaaaataatgtcattctaagcatacacattttctgaaatgaaacggtcttctagacacataaactctctttttctgatactttttctaccaagatcaataaaaaataaatttggaatttctactcctcccaattatggacatttcttctttcctctttattttaatttcatcttaatattcaattccatcttttaatttggtatgtactacttctctctgattctcttaaccttgtatgcttttatatctttattatattcctacaaaagctacaaattcctacaaatatctgtatatttccttcttacattttatttattatattttataaattatatatatatattttaacttattttaggtttgggggtacaggtgaaggtttgttatacagttaaactcatgtcacatggatttgttgtacggattatttcgtcaaccaagaattaagcctagtacccaaccttattacattttgaaagatctagaagtacccatacaaccaattcaaatctagacagaagtatttaatattttcctaatgaaatgttacattactttaaatatgtctaaactgatttttccttagtttaaaggtttttgctttaaaatatgataataaattgaaaaaaataaatattagtgttacttacttcctgaagctctgaagaaaagagccatagcttacaaaatacaatactatagctaattatgacaactattcaaaccaaaatctatctaatactttataggacagattcatcaaaggcttcacttccaagatatttaaataaatagaatcatctactgaaaatcttggtaaatcactgcaaatattgttcttcatctgtgtgaaagcacatgggataatactgatacaaaaccatactagaattctatagatcagaacatgagctttcctcccagatttaacaactcagagataataaagtaactataaagctagactgcccacattactcaacttctatcactgtcattcatgccaaggaaaaatatttccaggacatcacaactttcttctaacaagtaatctaaattatctacattgggggggtttttaaaggcatttaattcttaagtccttccaagtgttgtatttttaaaattaacattatacaatattacttagttcataaatcaactttagtttaatatgactttgaaaacaatcctgtttcaaaatctaaaggtctccagactgaatgtaattcgattttccaaagactatattgaaataccaattaagttttatcaacatgggcttctactgaatgctttataagtgaacgtcatgttcattataatgcagtatcaatcacatatattattaaaatcatcttcgtgtaattctttggttcaatacaaatttactcaacaccattgataaggaattatgctaagtgctatatagaatataaagtaagtacaatagaaaacctgcattctggtaaattccttttacatacaaataatgccaatgcaaatcactatgaataagtgctacagaaatggcacaaatggtcttatgttcataagaagaaaagttacttttggatgtggtaatcaggtaaaagtttggagggagggggtgcaatgaagtggggcggatgtggataagcagcacttcagttgatctaagaaggaagtggaggcttaaggcaaagggatagtgtgatatgggggtgggaaagtgacagcatacagaggacacaaagtgtaatttgtctagcaggaagcacatacagattctggaagtgtgagagataagatctcaaaagctaaggccaatttttgaaagatctatctgatttaatcaagctacgaagcatgaactttattaaatcatggaaggacgctgaagacttctgggagtgcaggatgcaagttttaaaatattctaaacgaggactgtggcaatgattatatagctcagatcataatgtgcaaaaaaacaggaacagataggttaagatgttcttccaatagttcaactaagaaaaccaggggataggccaggtgcggtggctcacacctataatcccagcactttgggaggccaaggcgggcggatcacctgagataaagagttcaagaccagcctggccaacatggtaaaaccctgtctctgctaaaaatacaaaaattagccgggtgtggtggcgggcacctgcaatcgcagctatttgggaggctgagacagggggattgctttaacctaggaggcagaggttgcagtgagccaaaactgcaccattgcactccagcctgggcaacaagagcaaaactccatctcaaaaaaaaagaaaagaaaagaaaaccaggggatagtattagaaatagaaaggcaaagatagaaacatcagaaagacagtgtaagactcagtgactgaaatgaagtacaaaggtagaaataagaaagaccaagatttatagcttagaaggctagattaaaaaaagcagaagagctacttgggggtggaagatggacagctctgtttgagacattacagcagacagcatacagtatacaaaaaagagctggagatttttcttaagtattaaaaaaaatctatcttttgatgtgccacattttttaacttactcaaagcacagtctaaattttgagtgtactttgacctcacaaaaccacagtatctgagtaaatgaattccttaggatgacgtcaataagaatatatagtttataattatatgtatagaaatatatgaattaaaacacatataatatttgttatatacttacagattttatagcagttactttgcttctcagactttcagtgagcctctcattttcttcttcacaggcactatacccactattagcatagccatagttcccatagttgccaggaggtactccttcacctgcaaggatcagagtcacaaaggtggttctagagaagccacttttgaaacactgttagttaggaaagaactgaaaaagacccctggagggccttgcaaaccacatatgtctctaatattcatactccaaatgaatttaaaaaataaataaccaaacagagatcagaccaattctttccattactctctgttaaccaaagaatattcagttcagttcattttgatacacatttctggattgcttattgattgtccagaagatacaaaaataggtactaatacacaagaatattcaggatacattccctgctcaagagaaacatatattttaatgaaagttctaaaagcagtaacatcatctacccattgaaaaagcgtggctgtgaagaggaagggaaaagtggttaatacagaaggacgggagctcatagcggcgagggttctttactggcatctctttctcttaaatagacagttggacaggaaagagccaaagcagggagggggcaaactgaagctctaggaaagagacacaataacttatgcagaatgctagctgagagtcaagagggagattcatttattcttcaacatatatttgaagaattaccatgtatcagatccactgttctttctaggtgctacttttatggaactctaagggataagaatgtacacctccctgcctaatatagtacttcatagtcatcaggctatcaaacaacagatggagtgggccttagtgaatacatatataaatatgttgggcgattaacaggaaacggcatagttcagggtgttagttaactatactttttttttttttttgaggtggagtctcgctctgtcgcccaagctggagtgcagtggcgcgatctcggctcactgcaagctccgcctcccaggttcaggccattctcctgcctcagcctcccgagcagctgggactacaggtgcccgccatcacacctggctaattttttttttttttgtattttttagcagagacagggtttcaccctgttagccaggatggtctcgatctcctgacctcatgatccatccgcctcggccccccaaagtgctgggattacaggcgtgaacttttttttaacataattgttgccatcaattttctcagtaaagggagaaaacgggctatctgctgaagaatgggtgatcattcagaatatacagtaaggagaatgatggaggaaagggaccgggactgcacaggattactaaagataaaacaaacttgtttgaggcaatatactacggtggcttcaatcgtcccaggtgtgtggtttttttctgcagaagagttcatcggcctgagttagtccaggagaaggtggatggttggactaatctatagttggaagcttataatattgaggttgcagaaaaacggagccccaagaggttgagactgcttgccaaaagagcggttgaagatctggattatggggattagattggacagatattaaagcagattcaacagtgacttgagaatgtggggaaaggaatgatatcaaaactagaagtctcagagcctgctgcacacagttgcttgcacctataatcccagctacttgggaagctgagggaggcaggatcacttgaggccaggaatttgagaccagcctgggcaacacagcaagacctcatctattaaaaacaaacaaaactagaagtctccatatgctcaatgagcagatgcagcagcagtgacaggaggtaacagcactgatcactgaaggacagtcaaggtgtgaataggaacttctttcaaggcacaatagaaatttcattttccctatgaagcaaaactctcactgatttcttacagctctgattgtatgtaacactaatattgcactctgtacagtactataagggaagagaataagtttgtttgactcaacactgtatgtccccccataaacctacaaacacatacacactgtaaggcacactcaatgaatacatgatgtgaactaattaatgaaaagaatctgagttcactgttattgaactttgaatgtgcatacctttgtccagaatggaatcatatgcttctctgaaggcaaagacagtatctcatgcttccatatcctccctgtacctaatgagtactttatatgcagcagatacctatgcaatctccaccaccacaaaaaccacaacaaaatattgaagaagtattttccaaacagaagagagttgtactatctgaattttgctgctgacacactatccatgacacactatccatgaagctctccacatgttttattataaaagaactcaaggagtgggcatatttttccgctcagtcaaatattaaaatcaccatttaaaaatgcattcttactctgttaaccaatgatactctgtgcaaactgtagtttaataagggccaagatacttaaagaaagaatgtcttcttattttgtgtggctgaggttctgagtatataacatttacccaataagtaattactgactggttgaattcaaacatttgacaacttcaccaaggaattcattataaattaactgctattttttctttcctttgtttagttgcttttgcctatcttaattttaattttagagttcttccatgctgttccatttattcaaagtgaaattcttgttgtatttatcgtccagaaatatatcaatgcacattcctattaaagagttgatcttccctcaaactatgacccatcccaaatacaatgacaaaagtaaaaaccaaataaaatgctagaattgctattccaaacaaagccacttctcttctggtggtgtactgctatgaaaagttgtaaaaaagctagtgagtactgaagatcatcctcagcctttgtttatttagataaacgctacttttttggataggttctatcagtaagctaacaaaaccatttagagattcatgtgaagtgtggcagcttctgcctatggatatgtatcagattcactatgatcccaaatttaaaatttcaggtcaatatgcattcatactttaaaaaaaaagaaaagaaaaaatgtgtaacaaaagcctttgtcacttcacaccaatgtaaattatagcaatagtagttacctaggtaattacttctcctctcaatcacagaagagcttttttttaaaaaaaaaaaaaaaagaaagaaaaaaaaaggaaaaaaggagaaggtagtgggctctaaattggagaaattctaattttactggctgagctgaggtccaggtaacaatactttaaaaacttcccaagggattctaatgtacagtcagggctgagaaccattactcaagtcactttcctgcaatttaacatggcacactgcagcaggaaaatactcaaaagggcctaggggcctactgatgaaatccaaactctttggcctcgcatgcaaagatctccacagtgtgatcccgaatcccctacttcacccaaactggcttaatcataatcccttacttcttttgagttcctcctatctggaactcacttcccccactctccattattcaaggtctacttcaaattcctatgtctccaccaaatacacaaagatcttccccacaaagtacacagtgatctatctctgaaatctctgagaccatcccttatatgtagaacttatctggtatttggatgtatagcgacactttgtactacaatttatctttgcacatattcctactccccacctagactggaagctttggggatcacaaacagggcaacaaacaactgtatacctagagcttactcaagcacacaataaatcttttttggtattaaggatgatgaacaagaaaaacatttagacatataaagctaaacttgctcaaaattatttcttttttttttctcttcaatttacctggccccattttctatgatctaagtattcataaaaacttcattaaaaaaacaaaaaactttctcatactacaatttattgatcaataaacaagtctacggttattggcaactttcactgactttaaatatctgacactttggggattttttttttcttttttcaatcttataatgactgagaaaggtaatatcttttttcaaatgtttcatttattttctgaagtatactgcactctaatttagcggggtcttctttaaaaaaaaaatcgtgtcctaagagaaagcttcagaaccagaaaatgccgttctagtagctgtgcgttactataagggtccattaaaattccttgtgtctaacttattcttgctgatgagccagtttcctaaccccaaaggtaaagatcaaatgttaagtcgccaaaccttaaccacgttctactgccttaaccgtggcacaaggttcagattaagaaatcgcctttgacccagaagttccagttccaggacctttaacaataatgacacatacatttacctttgtaactcactgttaccagattaacgaccattactagcgtgctttgggtgcaaccacccactcttcaaattccgcttctgaagaaactaagatccagggccagtagggaaacagaaaccggagtcgggctttggaaaacatagcagcgtccataaccacgctcagtcaataacactaaaacactcgaccactgagatgccacctgtacacacccacccctagtccactactttctctagcctaccatccaaacttgaatctgactcaaacttaaggaaattccaaagatctgggacaaatggtgtgtttccactcgacatggaccccaaagatcccctctagacatcctgttttttggaccaaatgccaggaacataagacaggttcgatttcctcccgcgccccagcgctcccggttctagggccccgaacttcgaacctcagccctcttcttacccaggcctgcacgcctcatcctgccagaggagagagagaaaaggcgggtgcggggctttgggtgagtaggaaacagctaggggcgacccggaccgcgtcttcagtaccagggcccagcgaaacaccaacttcttcccctaaagcgccacgacatcagtggagtctaaacaccgcgccggatgatggcgtcaccacggcgctcattggagccctgggaagaaggttgaaaggcattctgggaaatgtagttcaccaacgcataacgtgttgctgagggcgtgatgtgaacccggttccaggagcggacggggcgtccggaaaagggggcggcttcgactgcggctctgattctgggtctctgatccaacgttcccgctgttccgctcgcagcccgcgggtcgctgctttcagtttgttgaccaccaagtttaacccagcagatctgctcctccccacccacaagaggatggttggggtatctttcctgatttagcctcgaactccctctcacctccagagacgattcagggaaagttagagaaaactttgtccaggtttctcagtttacaaacaagtaatccgacacccacagaagtaaccgatttgtgccttgtagtatccagtaaaggaaagaaaaccaggttcctttgagtaggactcctgctcagatgagagcagactaggaaaggctgcgggatctggtcagaggcactgaatagttagttccctgttactgcatctgttgtacttctagaaagaaccaagacttttagttgttatggggaccaaaggacccctaaacgctctcccacttttttttttttaacttacacaaagcttattgaaatactgcttacacaaggcagtgtgccaattaggggtttaaaacttgttggcgagttggaggtgttactggtatcgaggttaatcctagaatttcattttatctcagaggatttatcgtgagaatacgatgaaatcgtggtttttgaagggaaaacaaaaaaacctgatacacagtaggtgatcaaaattcactgggtgtctgcggttttgttgttgctgctgtatatatggcagtggaatcgtctccacactagagatttccgaatatgtgatctttgatcatttagcgtttcctcatagtttcccaggacattattaacattgactataatactggcataagtctctgcgttaagttgcttttgtaaaaaacacatgaaaacaatttttaataagagttattaacctgggaaggaggctttatccaatagtgttttgatagaaaaaaatcattaaaataaaaccgccattttctaaaagcaatgaaattaaataagcataatatcagggacaattattacaaataaaagatggagattcaataaaagaaatgatagctaggtatccctttataacttaaaatctgtgacagtcctttggttaaaaaaatgcatgttctataattaaaacgtttaaaaattgccttacagaaggcttgctgatggaaatgtagaaatcgttatttttgaaaatatggtaatatttactagaactaatcatttagattacataaaatatactgcttcctttacatggtaggaagacataagaatgaaatgtagttaaaaggaaaacatatataatgtactaagaatataactgaagtaaggcaaagctagttcatattgaagttgttacctaaaaaatccaattattgtttttagctaacgttgctagtatcaaattaggataatgtcatctgaaaaaaatttgcactcaaaggaagaggcaggaaaaatgaactcaatgtgcagaaaaagaattattaaatgtgaccatagttgacattagcgatcagagggaatcattttcacttttctcgttgtgctttttcctttttaaattaaaatccttaacttttcttactgattgaaagcaaataaatttcacagagatgaatagcatttagaacctcttctctattctcacaggatagtctcacagaaaacatctaatgtttgtaggtctctaggagataaaggactaaaaattacttaaaataatattaagtattccttctagtaattacaaaagcaagaataaaagcaggaaatgtctgaatcgaggtgcaaaattggaacttttctttctcctatctgtctgcttcctgcctgcccatttgtcctacctcttcctgaccaaatttcaagtccaatccaagggaaaagagcataccaagctctcaaaactggttcaataaacattaacacatttttcaatcatgaagcaaattcagtatctcgggtatcatatttgaactgtcacaaaatgtaaactagaaacaaaaagctcttgatttacaaacaagctatgggacaaagtttgtttctaagtttgttgtttggtatttaaagcacattttccctgaagactgaaatgatggtcaggttcccaactcagcccagaaaacacatggctgttagagttactatgctggccaatcaaagtctgtgtaacccataggacagcagaaataccgcgtattttcaagaccaatagaaggaaaataatgttgtaatacttgtgataaaataaagcaaagccattaaagaagaaatagagtgtttaaaaattattttggttattcatgtttgagaaagaatgagttttacttaaaagttttaagaatgcgaagaatattttcaaggagtttgcaaaaagtcaccaatttgatctgtcttttccataatttgggaatattactagcactgatggcaagcttttcagccatagtttgtaaaaattaggcacacaattccaaccttaaagtcctcagcagagccagacacataatttgtggggctcagggcaaaatgaaaatgttgtgcctctagttcagaaaacaggggaaaagttcagttaaaggtattaagatacaaaacttctctttcttctgttttcttctgtaatctccctaccatcgttcctcccctccccacaccaacttgtcatggtgtttttatttgctatttaatattcttctgagtaaagaaaaaaataaattattagcattaattttacccttgatctttatattgtgcaatgacagttttaaatgcaaacataagagcacgctactcgtgaaatcactaaaattacacatttggtattttgtactttgatatggtttggatatttgtcccaactaaacatcatgttgaaatgtaatccccagtgttggaagtaagtcctggtgggaaatgtttggatcatggaggcagatcccacatgaataacttagcaccatccccttgagtgagttcacacgagatctgatgtctaaaagtatgtggcaccacctcctgtctctctgggtcccactctcaccaagtaacctgccctctcccgcttcaccttctgctatgagtaagagctccttgaggcattaccagaagctgagcagatgctggcactatgcttcctgtactgcctgcagaaacatgtgtcaattaaacctcttttctttataaattacccagtctcaggtacgtctttataaaaatgcaagaatggcctaaatagatacctcacacatgaatctgtatttcattcttaccatggcagagcagtcaaaacactgcatcaaaactaagtcaacagattttatttcatgtcttgacaggcacatactctaccaacattctaccttcagcctactgatgagttaggagggacttaaaagaaagagagcaaggggttgccttatctattcttttccttttatgccatcatttttaatacaattggctaacacaacaatgtaagataaaaaagtatgtgatagagttccttggtcattttcttctttctgtggaagaagttctggttcaagcagagcacgtggccttttggggctgtcagtgtccatacttattctgacacaaacttaacacaccttttgtactctttttgagtgtttctgaactcccatgcgtcatgggtccactggcattctgtgttcctgggtcactgcaaatgtaatattcaaatgaagtggcaaagaacaatgaaaatgcatgttgtacatatctcctgcaatcgtgggcactatctcttgttccataagactttatatacaaaacttaaggccaaaggtaaaattattaagaatttcaagacagtgaccacagagcattaagccaagtttgggggccttctgattaaggaaccttatgcaactgcaaaggttgcaggcccctgaacctggccctggtcctcagaaagaaattttcaaaggaaatagggccataattggtagagaaaaaggagggaatgagtgaatacagaggacatatatatccacagatagaattaaaatgaaacatttaaattgagcagtgaaattcacagggaagcaagagagtagagtatacaggtactgccccaagagaaaggaaagaagaaagggaagaggtggtaagttgcgcacttctctcaaaccactgaccaagccagtttctgtctgaagtaaattattattgtggttgacgagccatagatgagtaaaactctagtgtgtataagcagtaagaaaaactgtcctcaaggtgggcatgatgccagcaaacatgagtgatggggcataacttcagggatgaggctttttctgtgtttcatggcacaatgtttcacacttccagcaattctaatgtattactaagttctcattctgggaaatgattccttccttaatatcagttaatcagtagctgtgattttttttgtctgaatatccggccccacagcagaacagtactataaagataaattttaaaatgagtactttgcataggctgcccttttaatattccaattttgaagacatctttgacatttctaaaacataatttgagattaaagaagataggtttaattttcattgcctagaatatgtcggtgttgtatatttttaaattctctgcattatctatcattcaagactaatttagtcaagttgatagtcattttattttaatagcatttattattcaataagtatattgaattatcatagtgatacatttaaactacaaaatgaaaaatgaagtatacaacttagttttattcctacagcactgttagacactttgacagacatgttacactactgacttgttttttttcccagtggtgattagttgagtttatatcatagacaaaacacttcaatgttattcagatatgaaaatatgctatccacttttatgtagtagacattcacttcacctaattttcctgttttactaaagctaatgatctcatgacttttgatttctagaattaggccaagactgtgtcacagatgtatgcaagtcatctcatttcaatttgccttggctattgacacagaaccactccttggagcctaaacgatccagttttctcaccttgcctgttaaccataatcccacactcagctgaaatgatccaattttttatctttaatattttgggtttttttcttataggttgaatttaactgctttggaatatcagatagcattaaaatgatttaattattgcaccaagaatcattattattttacatccacattccaggaggatggaatctggtatatcctttaaaacacatttgtgcttgagtaaagttttcctgtaactaatttgtactgacttcctcttcttgatttactttatggtacatctatatcaggatatatagatcgcaatactttgctcactcattatgggcagtaattctgaaatcagatacatgcttcagattttaatgtaatggagcattttcttaatttaaaattcttctctagcaaggttttgctttttacttttccacagggaaaccatttctgatggcacaaaacttgagtcataatgtataagctttgcagttataaaataactgccatctttgttttatggtttactcacctgtaaaagctgtttattgtcaaataggagacactatgaatcaaatttcttctcttgctgcagtgcttcccccactaaaaaatctctattaatagggccccccaagatcaaaaaggtagtttgatcactgttagcaaggagttatgcggagataagaattgttacaaggagaattagaaaactggttttataagaacagacaggagagaatttgccactactgctctggctgctcaacctttattaaagtattaatatggcacttttgggcacttagcttggatgccttattctaggccagtgtgaattttatggctcagttagaaaactttgcaaagaggaaaaaagaagtttttaaataataatatgtgacattaatattcatgcttatacaatcctatgaaatctgggtttgatttcttttctttccttccttccttccttttttcttccaggtgccacccacagaatatttaccctgtactataaagaattaaaaaaaaaaaaaaaacgagttgggaagatgctttaattctctcccagatcacgaatgtcctcccttatcccaagtgaaggagttaagtagatgggtcatccagtatgtcaccatagtactctactagtctaatgggtgagggttaagtttactgatgaaacagacaacctgacagactctaatgctagtgaaataatggagtagcttgtcaagagtatattgagacatctctttatccagaaggccttaagacaaggttagttcaattttgctcaatattctgtttgacttaagggttacaggcatgcctctgcagatgtcagtctctattaatatcaacacttgtcccttctccttcattgcaaagccagcttagttacctgctaagaagatggcaccacgatggtaatgcaacgaatggatgtgggagaaatgagacagacagtgagtagccacgtgtcatttacctgcagatgctattgacatcctgtttatcactctaggcctgcctccttttgtgtccagaattggtgggttcttggtctcactgacttcaagaatgaagccatggaccctcgcagtgagtgttacagttcttaaaggcggcatgtccaggtgatgttcagatgtgttcagagtttcttccttctggtgggttcgtggtctcgctggcttcaggagtgaagctacagaccttccccgtattacagctcataaaagcagtgtggacccaaagagtgagcagcagcaagatttattgcaaagagcaaagaacaagactttcacactttggaaagggacaccagcgggttgccgctgctgtctcaggcagcctgcttttattcccttatctggctccacccacatcctgctgattggtccattttgatagggtgctgattagtgtgtttacaatccctgagctagacacaaacgttctccaagtccccactagattagctagatacagagtgccgattggtgcatccacaaaccttgagctagacacagagcactgattggtgcatttacaaaccttgagctagacacagagtgctgattggtgtattcacaatccctttgctagacataaaggttctccaagtccccactagactcaggagcccagatggcttcacctagtggatcctgcagtggggccacaggcagagctgcctgccaatcctgcggtgcgcccgcactcctcagctcttgggtggttgatgggacagggctgcagagcaggtggcggggctcgtcggggaggctccggccatgcaggagcccatggcggcagcgggaggctcaggcatgggggcctgcagatcccaagccctgccccacagggaggcagctgaggccccgcgagaattcgagtgcagcgccagcaggccggcactgctgggggaccccacacaccctccacagctgctggcccagttactaagcccctcactccccgaggcctgcggcccccagcggccacttggagtgcagggccgccaaacccacgcccacccggaactcgcgctggcccacaagcgcctggcgcagccccggttcccgcgcgcgcctctccctccacacctccccgcaagctgagggagccggctttggcctccgccagcccagaaaggggatcccacagtgcagcagcgggctgaagggctcctcaagcgcggccagagtgggcgctgaggccgaggaggagccaatagcgagcgagagctgccagcacgctgtcacctctcactttcttctcttccaataactttatttctaccatttctttggacattcctgtttagatatgtcacaataatttcaaactcagtaattttcactcctaaaccagcttgccttagtgggttttcttgtccctgttaaaaataccattaaggcccaaagcctctggatttttttctactttgcctattaaaacaactcatctgcaaagccctattgagactgcatttgaagtatcatttttgtcctctttctttccattccaaaactaacaatattaatacaaatttcaaatacctcaaatcttaccagagcttcttcacttccttgttctcaggtccattttccccaaacacaccagattgaaatttcaagaactctaatcccatctcattactatttaaaggcatttaatgaattctccatgacctgtgtggggaagcataaagaggtatgtttcagtttccctgaagataccacagaagtggtggttgtgttgggtacagactgtaggctggaagttggccagggagtgcctcctgtaggacaaaggaggcacagaaggcagcagcaattggcttggaagcccatgtctataactttccatttaatcaggatcctctggataggatcatggttctatagggtgcagtcaaccattcttttccacgagctttacccagtttctatcttattaggaccctacactctgtaatttagacacattaatctacatgttgtttcttgcacatttcagagaggataccagtaggttagcagtgcaaaagaacacaaaagtttctttcctctgttttttttcaaccatcatcattctttcccttgctgcaattattcacttcacttctttctttttttctcactcttcctctcacatctctccatgtctcataatctacaaaaagcccctaagtctttaccatgtaatcattccaattaaaaagtatcaaaccgctgcacagtgttctttaatttctttagactttaccatagatgttgtccatagcaatgacctgaaaaatattaatgcgttatgaatgacttctcctttcttcattctcaatattttttaatttgcatatcattatttaactttgtattaaacaagaagtttatcttgctcttccaattatagtcattgaaagcctctcttcttctttgacttctacagcacagagaaagtatgcaataaatatatactgattggctgttcacaaatcaagtctcctcattaggagttgttgatattttcactcctccttgagcaaacacatggttgtcttttaatatatttttaatgaggtaagtacatggaatttacttagggcttagagaggcaaatctatgatcactgagctttcttagagggagacagatttgtaacaaaaaggcaactataggaatggaaagagtggagtagcttaaggattaaaagaaagataatgaatacaacggtacagacaaaagaaataaaaaagaagggaaacaaacacagaaagcctttatctaggagaaagtgaaagagtgtggaagaacagttggcggtataagagttgttaaataaatcaaaatatttgtttcctgtcacaggaccattgtgtttggtcttctactggtttatggtgcatgataggagtttagtattctttgtttctgccagaatttgagaatgtccttgaggctaagttgtgggaaaagtaaatatgggacagcagagttgctgtagaccttgatttggacccttgtaatggtcttgcctcctccactctctgtaatgatactgctagcctctagaccttaagtgaacagcctaaacagccattctgccattcctgtttttcataccttctcacactggtggtgcaaagtgctccattctgaaatgttctagaaggaccatgctctaagttgtctttgttctacaacttttattaatcagctaattattattcctttttttttttttttttggtgacttcaaaaccaaatttctttttttcttcttcttttttttttttttttagatggagtttcgctcttgtcgcccaggctggagtgcaatggtgcgatctcggctcactgcaacctccacctcccgggttcaagtgattctcctgtctcagccccgccagtagctgggattatgggtgcccgccaccacacccagctaattttgtatttttagtagagatggggtttcaccatgttggccagggtggtcttgaactcctaacgtcaggtgatccacccgcctctgcctcccaaagtgctaggattacaggcatgagccactgcgcccggcccaaaaccaaatttctattaaccgatgaataggtaaataaaatgtggtatttccatacaatgtgaacctgctgataatggagatctaatgccagtcttattttattatgccagagagatcattgggaatgttccctttgattttagaaacatgagtatgacctttacttgtcacactttcaaggaactgaggactagacatctgaatttcttcagatgtgaataaaaggatatatgaatttaaggatatgtgaattaaaaaatattgagaatgaagaaaggagaagtcattcataatgtattaatatttttcaggtcattgctatggacaacatctatggtaaagtcgaaagaaatttaagaacactgtgcagcggtttgatactgtttaattgaaatgattacatggtaaagactctttaatttcagagatgttctcctcatttcatgtgcccctgactggattgtcaatcaagtcactccatttatgtcctatctacgggagatacccatacacttagcacagtgattgctctaaagcatgagcacataacacaagcaagtccagagatcttccataataagagtgctgtatggaccctgggaaagagtcgatctattccttttatctcacaagctgtaaaggtaaaatctgaagactgctagaagacatttttcctaactcaagaagaaaaggtatccatagtaggatagaatgaggcaaacacagggaaggcttgacacacaaaactgattatgatggagataaaaatagaggtggagatggagatggaaatagagaaatgagatagaggattataatgatattgtttggactctgaatccagccatgcctaacctcagatttgtactaagttatttgtcagtaaactcctatagttttgtttgttttgtttttgcttcaattgccattaaattggatttttaacatttaaaacccaaagagtgttcaatattcaatcaggttgaggaaattttgctgatagtgcttgtttctaggggtttatccaccctaagttaagtgtaatttcctgattgttggccaaaaaaaaaatcatttttttatagttcatggataaaataaacatgacatggatggataaatggtcatggatagtttaatatataagaatgatgtaataggctgaaatttaaaaattgtttctttagaattaaaaggctactcccatatctaatgcatcaattctgacatctaaaacaaaaactcttaaataatgcaatgcactattcattaatttgaaggacatttttgcagtcatcatttgaaatatttcttaagaacaaaggatgaaagataaaatatgcaagaaaaaattattttttgtgtgtacaatccaccattttccttcttacagaaaattatttactgtgattctttatttcaaaagaagttattgcttccatttcaaaaggaattatacataaagaaaaaagtcacatgccccaaacctagtcaaacacataatataaacaatcagtataacttgggaaagagatgtatttatttttgggttaactacatggaataatatacttcctaatatttttattcgatatgctcattgaacacaataatattctccaggtagaagtgactgataaacatgcatacttactttaaaattagaaagaacttttttctgaactctttttttttttttttgaaacagagtctcactctgtcgcctaggctggagtgcagtggcgcgatctcagctcactgcaagctccacctcccgggttcatgccattctcctgcctcaacctcctgagtagctgggactacaggcgcccgccaccacgcctggctaattctttgtatttttagtagagacggggtgttagccaggatggtcttgatctcctgacctcgtgatccacccacctcggcctcccaaagtgctgggattacaggcgtgagccacagcgcctggcctgaactcttaaaattagccataattgccctgtaaggctcaggttaaattgtcttcgtcccatagatttatctttatcactgtaaataagagtaatcaatccttctctaaacttctagccacttaagacatattcaagaagcatttactaaatgtctcctataagcttatcactctggtggatacaaagaaatataagccatggttcctactgttaaagattttacaaacctgttagtgagattaggagtccatataaagaaagttaaatattatccaagagattaatgcaatcctgtattgcaaggcgattgataacctccaagttccaaagtaatagttcacatgaatgtgaagtcttaaagcatgtatccacaactgagctttatgcttctttactcaagggtaacaatgagttgtaaaaccagagtatagttgggtcatgcaaattatacctattggaatatacttgaaacagtttcagaaaaaaaagaacatgaaaatcaacatagtttatagtttctcaaagcatgtagtgggaacctagaaataaagtaaatgtgcatcattaatgaaaaaagctaaataaattatgtcatattcatactattgaatatataaagccattaaataaaatatatgtttatatgagttcatttggagggatttctacaatgtattttaagtaagaaaagaatgatacctaaatttaaaaattgccagtcatcagaatcaggacaatttggctgtcaatttaagtcattaaactttgggacagctatatgaaaatggtaactgataacaagtttttatttaaaaaaactatattacttatacaagtgtttcagaaagatttctgtgaatatattaatataactttcagaaaatacatagatgagttaaataactgtcacaagcaaaaataaaaaaagttgtaggaatttatttaatggtgaaaggagtctcatccctttttcatacgataataaatcagtttgtataaacccattattgtaaaatactacatatatagagaaagtgcatataactctgatatatggcatagcaaattcttataaagcaaacacctgggtaataaaaacagaatattatcaacaccctttgtagtgctctcatgttagaacttttacttgcctcttttaaatatagctttatgatggatttttccttcttaaacatgatagttttttttgttaaacatgatagttttgtttgtattctgtgactgatttgttttgctcaatggtatgttcttaaaagttcaacattggtatatatagctatatttcatttctttatttttattgctgtatcacagttattaatctattctttaattattagacatctgatttgtttccagtttggaattgttgcaaataacttgactttgaacggtcttgtcattttcacatgatacagtttcatgtatttccctagtgtataaaatacaggagtggaattgtcgggtcattgtatagttgtattctaaatgtataagatgatgccaaactctttatgaaatgaacaaataatggtacgtattttaattgattttgcactcctattattactaatgagattgaacacattttcatgtttttgagccatttgaatatcctcttttattaaatgcctgtttaagttttctgccccctttttattgtatcggtcattatttatttgtaggaggtctccatatattccctttccaaggcctatgtttgccatatgtgttgcaaataactctttccattctttgtattaccttattttactactaagtaatgccctttgacaaacagaaattctattattttatagttagaatattctatattctgtttgagaaaactttttccaccttgaggtcataaagatattctcctgtaattctaaataattagtttttttgtccttcacatttatacctatactttaaatgtaattggttttatgtaggagatgaagtaggaatcaagttgtattttttttcagtatggatacccatttttttcattatcattcttactgaaaatactgtcctttcccccaatcctgtgtaatggtaattttctcataaaccaagtaccacaatatatgtggcctttttatgaactctttacctattccattggtctgttcttttatacttgcagcatcaatgcactatcttaaatagctttataatataacttaacactcagtaaagcaagtctccctaccatgtatttcttcttaaaaaatatctcagaacttcttgcccctttgtatttccatataacttttagaaacagctgtcaagtttcacttcaaaaatttagtattttgactgggattgtattgcattaaatcagcaataatatacttaacagcatagagttttccaattcttaaacactatatatccatcctaattatgttgagattgcttacatactgttctatagtattctgtatagagatctggcaaaatttttactacatgcatccctacgtattgatattttttatgcgattgtaaattatatctttcttaagtatttcattttccaactgttgatgctatataaaaatgaaataaaagattacccactgattaaagtaagttgtctataaaaagtaaactattttacaaaccacggctcaacgaaataaaagaggacacaaatggaagaaccttccatgctcatggataggaagaatcaatatcatgaaaatggccatacagcctaaggtaatttatagattcaatgccatccccatcaagctaccaattactttcttcacacaattggaaaaaactactttaaagttcatatggaaccaaaaaagagcctgcattgtcaagacaatcctaagccaaaagaacaaagctggaggcatcatgctacctgacttcaaactatactacaaggctacagtaaccaaaacagcatggtactgataccaatacagagatatagaccaatggaacagaacagagccctcagaaataataccgcatatctacaaccatgtgatctttgacaaacctgacaaaaacaagaaatggggaaaggattccctatttaataaatggtgctgggaaaactggctagccatatgtagagggctgaaactggttcacttccttgcacattatacaaaaattaattcaagatggattaaagacttaaacgttagacctataaccataaaaatcctagaagaaaacctaggcaataccattcaggacataggcatgggcaaggacttcatgactaaaacaccaaaagcaatggcaacaaaagccaaaattgacaaatgagatctaattaaactaaagagcttcttcacagcaaaagaaactatcatcagagtgaacaggcaacctacagaatgggagaaaatttttacaatctacccatctgacaacgagctaatacccagaatctacaaagaacttaaacaagtttacaagaaaaaatcaaacaaccccatcaaaaagtgggtggaggatatgaacagacacttcccaaaagaagacattatgcagccaacagacacatgaaaaaatgctcatcatcactggccatcagagaaatgcaaatcaaaaccacaatgagataccatctcacaccagttagaatggcgatcattaaaaagtcaggaaacaacaggtgctggagagaatgtggagaaataggaacacttttacactgttggtgggagtgtaaactagttcgaccattgtggaagacagtgtagcgattcctcaaggatctagaactagaaattccatttgacccagccatcccattactgggtatatacccaaaggattataaatcatgctgctgtaaagacacatgcacacgtatgtttattgtggcactatccacaatagcaaggacttggaaccaacccaaatgtccatcaatgatagactggattaagaaaatgtggtacgtatacaccatggaatactaagcagccataaaaaaggatgagttcacgtcctttgtagggacatggatgaagctggaaaccatcattctgagcaaactatcacaagggtagaaaaccaaacaccgcatgttctcactcatagttgggaactgaacaatgagaacacttggacacagggtggggaacatcacacactgtggcctgtcatggggttgggggagggggagggatagcattaggagaaatacctaatgtaaatgacgagttaatgggtgcagcacacccacatggcacatgtatacatatgaaacaaacctgcacattgtgcacatgtaccctagaagttaaagtataataaaaaaagagagagagaaaaaaaataaagtgagataaattattctaaaaaaaaagtaaacagttttatttcttcatttataatccctaggtcttttgtttattttcctttttttcctatatttcactggctaggacctccactataatgttgaacaatggtaatctcatttacaaattcaaggtgaaaactttgactattaaaacattaagtataacattttctttgttttttttttttaaaaacaatgtcagattaaagaagtttatatttctagcttgccaagtggttgttgaattttatcacattctgttctgaagcaaatgagataatcagcttgtaaaatcttcttttaatttgctgaattacattgatcttcaaatgttgaaacaactctgcattctcaggttaaacttaacttgtcagaatctagtacagtattagtttttatatattgttgaatttgatttgaaaaattgttaaagatttatatatttttattaatgagagaaactcatctgtaattttctttttctgtaataatgtcagatgttataatcaaggttaggtggcctaattccttatgtatatggaagaatttactggtgaagctgtctgatcctcatgatttttcacctatttttaaaaatatttgttatgattgttttaatgagtaggtttaatatctgagtcacttgtgagcctatttatattaccttttttcatctgttttcagtcttggttcttagcatctctgctaactctttatgggattgtagagtatttgtaatgccaattcataaaatttgaaaagtttttgattaaaagaaaaaaatcataaaatctcagcttttgcaatctcagcacatagtatgttgcattgtctgttttgtccaattcttttaaagtccaacatgggattttcttgaaatatgcatggcctgaagcatcaaatatttaggtaaacaggcaaaagtctcagtaaaaattaaaataggaacacattagtaaaaagacagagaatatctatacatttcaaaagtaaaatacccataaaattgaaatctgtgcaggtaaaatgaaattattttggaactgatttaccacaaatttgtgaactggtgctgttacaaaaagaatagagtagaattagcaaactgtgcttaaacttttaaaattgaaatatggcagaaatacagaattaaaattgcatttatgttctctgatgagcccaactgttcttttaggaacagcttataaaatatttcaaataactacaaaataagaaagccctttcagaaatatccttaaacaaaaaggatagaacaaaaataattactttctctccaaatacctcatgagatctattctacttttatataaattttttatgtttatataataccttgttattttaatctgtatttgacaggcatggatactttcatttctgtgagtgtattgggagcaagggggtgtgacaggattccatgttagaccagggacttgttttgatgccactaaggagactaaattttaaattggacccttactttctacacactccccacaatcctgatatggttcagctgtgtccccacccaagtctcatcttgaatcgtagttccaataatccccatgtgtggtgggagggaacaggtggagataagtgaatcatgagggtggtttccccatcctgttctcgtgatagtgagtaagctctcatgagatctgatggttttataaggggctttccccttctctggggactcattctttgctctcctgctaccacgtgaagaaggatgtatttgcttccccttctgccatgtttgtaagtttcctgaggcctccccagcccttcagaactgtgagtcaattaaacctctttcctatataaattacccagtctccggtatgtctttattagcagcacgagaatgaactaatacacttccccaccacaatagtagaaagggcttatgtctacagacaagcttattctctttatttgttggaaacatgacaagttctggcttctatgactctttttctatatacatatttttcatagaaaatcaaaatgaaaagtattttcagattagcaaaaataatttttaaagttagaaatgtgatttcaaaacaagaaagttggtacaccccacagaggctgcttaactcatggaagattaagcaaatcatattctgtggggggaaaaaaacgaaaaaaaaaaaaaagccaacctgacaattccaaggcagttcaccagcattatttcaaaggaaaagcaaagttaaaaaaataaagtaaaatcaagataaagggaggagagagggaaaatattgaatcattcttgtttccctgtaaatagtttatcactctatttataaacagacacagagagcttttagtggaattgccagatattaattttttcaagagatttaatattattctgggagggagttatatccagttgtatggttctattttttatttgcccctactcctagagcatagccccttcaggttctcaacaggaagcatgggacattcttctttggttggccatgaacttaaaattctgttttcctggtaacatctaattacagtgttctctgcttaaagggtcaaccttttagaagctgctttctgcttgctttgtcagactttcttaccacacttaaactagctaggagttaacaaatatattgagggcagattacaaacagaaaatcaggctcacttctctgcagtcctctttttttctgggatcttggtccttcaagtcctgaatggttgttttgggaactctgaactccaatttctgtctccccagtccaaagagaaaagtgctgcaagttctaggctgctgcttcatgcccccattcagtgaatcaggaaatattttgagaggagaaataatgattgatttaacttcataaagcgtaatagcgtatgcttgccaaaaacatcagaaacaagttatgtcagaaatagtgtctctaccttaaattttgttcatcctttctatagtatacagttgtagatggaagtaacagctcagctgaggactaaatttccttatcccatttgccatgagatgtggccatatgacttgtttttgccaatgaaatatgaatgaaagtaattcatgccaccttctaggtcatggcttataaaaggctagtatgtctcttccatactcccttcctgcccctacctgggtgtggacaatgataaggcctgaggggagagtgaagccacaagatcaaaggcatctgggccctaaaacctcttcatcaaatcacgctattataaatgtcgtgctcttgttgttataataatgtactaatacataaggcttaaaaattacaaattgaaaatatatattgtcagaatatataaattataatctgaaataagggtttcaaaatcaattgataaaagaggaatattttaataattattaggataaagacaattctcaaaagaacgtattattaagataaggatgatgttggaaaagaatggtgttcaaaataactactgatgttcaaagtagctactgatttattattacatattaacaatggtgtatgatatatagcctatgagattagtaataaaaaattttaatggacatgtccagggttgattgatgagagaaatgaactgctaatggaactctaagtcaataaaacctgtatgacagtttggcaatatgtatcagaattttaagtaattatatactttgaggcagagtatacttttcccaagaagagaatgagtccaaaaggatgtaaacatcagaatatttatttcataatttttaaagaacccaaaacaaaaacatcaatgagaataaccagtgtacaaattgtgtcagtatcataaaattatgtttataacattttaagtattcttttcatgaatatgtattcatatgtaaatatatatatttaacttataaatacatgcagtgtgtgtgtgtgtgtagaaagagagagagagagagagacacgcacacacacacacagaagaatcaagacagatacttgccaaatggaaacagtaatgatcagtgatgatggtattcctgctttcatgcttatacctctttgaaccaattgatgtttttaagaattttaaaacaggcctgtattagcatttttatgggggaaagggggaaaataaaaatggtcgtttcttcaaaatacacagataaaatttggttggaaaaatagttagcaagagcaactaattctctaaaaggatggggtacccaagactcaacgttttatcttacccactttcatttgctcattcattcagtcatcaaaaattgcattttggggactctctatgtgccaggcacaatatccttaggaatcctattatctacctaaacttgagactcactgaggagtattctggctttcgcatgcccagaggatattcttgaacaattagcggatgcttcaaaaagtgtaataatgtggcaaggaatctaaatgtgtgctcctcaatccacttccatcagtaatgcagtgagtagaggtactatccagaacttttgcctgtggttttctcttctctttagcatccactactactgatagtttcatcaagtcattttagtctctatagctattttaaaatgtgaaataaggacttaatgcatatttcatcttctagtcattttaactttaaagattttgaattcactttcatggctgtactgaaaattaatttgttcaaatcagtccccattggaagagttgagagagaaaatggagatggtttccctacggtggtcatttttattgctttttagaggcagataattctttgattaaagcaatggtccccttttcccaaaaaaaaaaaaaaatgagtatggaaaatggacctacctggaaacctttgcaagtaacatcaggagttccaggctacttacttaagaacaccttctctagcacagagaattgtgtttagactcagggcagcactccctcatagacactttccaagggcaaaatagactaattatcttatgtactaatgatgctcatgggtgtctctcaggacatttagatgccagaaagaaagttatttccatgtaacatttgctgataatgataaattatcctttaagaattatcacatcaaatagataaaactagtttgcctgggtaggaaacataatgtggaagcctttatgtctcctactaaaaactttccatctattattgtatccttcaggagcagtgaccttccttctattgacagttctggcagaaatctaggaaacttgaatataactttaagcatccccagaagaacatgaattgttattacaaagcaaaatggtcactttaaaattgaaggttgaatatatatgcacattacttagatgaaaagtttggagtatatttgctttaatgattccagaattttttattttattttaagttctgggatacatgtgctgaacgtgcaggtttgtcacatgggtatagatgtgccatagtggtttgctgtacctatcaacccgtcatttaggttttgggcccacatgcattagatatttgtcctaaagctctccctcccctttcccctcacctcctccccctctacaggcccttgtgtgtgatgttcccctccctgtgttcatgtgttctccttttcaattcccacttatgaatgagaacatgcagtgtttggttttctgtttctgtgttagtttgctgagaatgatggtttccagcttcatccatgtccctaaaaaggacatgaactcattcctttttatggctgcatagtattccatggtgtatatgtgccacatttcctgtatccagtctatcattgatgggttccaagtctttgctattgtaaattgtgctggaataaacatacgtgtgcgtgtgtctttatatagaatgatttataatccttttggtatatacccagtaatgggattgctgggtcaaatggtatttctggttctacatccttaaggaatcgccacactgtcttccacaatggttgagctaatttacactcccaccaacagtgtaaaagcgtccctatttcttctcatcctcaccagcatttgttgtttccagacattttaatgatctccattctaactggtgtgaggtggtatctcattgtggttttgatttgcatttctctaatgaccagtgatgatgagttttttttcatatgtttgttggcttcataaatgtcttcttttgggaagtgtctgttcatatcctttgcccactttttgatggtttttttttgtcttgtaaaattgtttaagttccttgtagattctggatattagaccattgtcagatggatagattgcaaaaactttggtggcttttttttccattcatctcttctgccaaaattatgacctcatttaatttgtttgtacatttatttcttctggagaccccatctccaaatcaccatccttatcttttttctcaaacctcagggaatactggcctctgtacatatttttaattgccttggtcttgtcattccctgggtctctatgtatgttgttcatggaacaacacatgcttggaatattctttcccttctttatactctgttaaattcataacctctgtagtaggcagaatactccaatgatgttcacatcttagtctccagagcctgtggatgtgtacatggtaaaagataattacggttgcagatagtattacagttgccaatcaactcaccttaaaatagggaaagtagcctggattatacagctgggcccaatttaatcagaagcgtccttacaaatagaagagggaggtagaagaggagagtcacaggatggtgtgactatgggaacaaggcacagagagagattatgttgctggtgttgaagacagaggaagaggaccatgagccaaggaatgagggcaggtcctggaagctggaaaagacagggaaacagattctcacctagaacctccaggaaggaatgcagtcctgctgacaccttgattttagtacaggcatgtcaatgtcagaattcaatgcggtgatcttgatgtcagaatttgatgctatggaattgtaaacgaaaacatttgtgttctcaagaccactaagtttgtgatcttcacacagccacaatagaaaactattacatcatccttcagattgcaagttaaaaatcacttattaatttctccagatatccatgtttggagacctttaagcacagtacttactttaaaaaactttaaagtatgtaaaatagccataactaaaatttaacttaggtgtttatggctattttcccctgctagtctgtaaactccaagagtatagttcttgtctgtctgtgctttccacagtgtcaataaatgtttattcagggattggctctcccctttctcttccttacatacatatgcttccaaaggaaatcagagaaaatcgcccaaacaaaatcctcatagggcaaagatcatcagattccatatagtaacccatttaattcccatagtgcttagctttcctaggtcattaattctcagagagtaaccccctgaccaacagcattagtatcacctgggagctactaaattaggggtggatcctaggatttgtattttaataagctgtctccgtgatctgatgatgcacactgaagttcgagaattactgctttagtccggattgttgggccccacgcacagcatttctgacttagtatgtgtggagtagggcctaagaatttgcatttctaaaaattctaagtgattctgatgctgctgttcctgggactttacttgaagaataactgacctaaacaatgttaggccaggggacttctagtggaattttgtcaacaaaacctcacagcttatgagttttttatgacttagcactttgtggtttatgtgtcatcctaaaccagaagtctatatttatttttacagcaagattattatggccctttatgaaattcagcttacatctatattatagcaaatggcagttaggttgagcaatccaattaatatatctaagactatctagtttttaatcatacatattcaagattgcatgattttctgaaacaacagtctttgcaaaaatggattaaaagtgattgtaaaccagtttgctttgctttacaacctactgtatgattcttttcctaaaaaatgaatgtaaaattccccaatgttattatatttctgacaaagtgacaacaattgcttataaaatatttaatagcatgctttaaaaactaggaaatataacatgcagaacataaattacattttaaataatgatttggtttaatgcaagattgacgatgtatgcagtttataaatcgttttgaaatcagctttcactcaaatgtttctgtaactaagaatgattatggcaccactcttgtgcagggagggttctcatggaaagttaagttattgtcttaaatcaatatgcccgatgcttgtgatgctgataaggcaacatatttcaacacacacagtgacaaatggtggcctcttaagctgattttaaggtgcaaatagaatctgctttttatccatttgccttctgtagagaacaaatccttacatttcacagttgagagatacaacacttgaagtatcaatgacctgggacaggtatcacattgctttccattctcttataatagattccattattaaaagaagataaggatgagagccaaagaggggaacacacctccaggggaagctgaaagccagaagacagaaagcagatggagggagaataaaaacataacgaggcatgaaaatgctggggagtgagaggacttagttgacaaatttgagcattttgaaacaactagcagttggtttatggtgactgtaatgaggtaattaagaaggaaaattaagaataggtttatttaaaaccatgtaagttaaaatggggcgattattaacgtgagaaaatataaacataataaaacatctgtctctaatgaacaatatatttaccaagttacattaatgtataatgtgattttctataactgaaatgatgatataattagactgggtaggaagagacagggaaatggtcatgtgcaatgaggctgcatctaccataacaggaagtacacagttagtatccaaaaattacaaatttagaaatagcagcataaaccatttatttagaaatatgagaataagtacaatgacataaccaagaacaactacacagctaaacgtattaaaagtgatttctttccaaagcagaaatagtgtgggaatggggcagagttgaggtgctttttataataaccccttttaaatatgttcatgtattactgataaaatgaaacaggtaacacctaaaaagaaagactatggtgatttttttgacaacttaaaaagtggtttacaaatttattccattttcattttgaggaaacatttcatctgtaatttaaaatatatatatcatcagcaagaagactcaatcagatatctttaacatttgggtgttgagttctagatctgcctcacagaattgcatgagcttgggcaagtcatctcatcttctgtgaactttagtttccccgtctataagagttactgtgagaacttaatgagattatatcttaaaccacttgggaggtgcttgacacattatttcttacacgacttctcagcaacattagccccaactttattcttttcttcatgttcatagtgtctgttttatcacaatctttggcactggtttctatcactatgaccacatcttctcagtctcttttgatggtttctcctcctagaagcactttcctagagactcatcattctacagcttcacaccagatgactacaattattttcctggcgtgaagagccacaagcaagcaactccacattcatatttccagcacagatcatgcctgtgacttccagacctgtatgtctaactgcctttttgaaatatttttttggattattcaggtgtgcttcaaactcaacctatctaaacccaaactcatgatctatttcccccaaattttttcttccactgtttcttgatttcatgaatagcaccttcatccttccagttgcacacccagaaatctaagagttccttgacatctcctgcgttgacagttaaatcctgctcacatccaaaatgcaatccagcaacatagactgtggattttacatattaaatatctctcaaattgccctttcctctcttcctccaccaccactacaaacatagtctaattcatgccgtaatcatttcacacctacgccataaaagcttttcaactatttttcccctatccattctcacatcctataatcaattttccatagagaatcctgaactgttggccttttatcactgtcccttcctctggcatatcacagattttcaatgcattttttaaaataaatgcctacttgcctgaggtctatttaagtagttttgaatgtcaaataaactaatgtaagcactgtaaatgaaatactgtaaatgaaatattgtgaagcagggtttacgatgtttgggaatattgactttgataccttagaagtaaattccattaagtgtaaaaagctctaccaccttttaagggaaaataaattagattcaaataggtagaaaagcagggagaaagatgagatgtttgaatagaagaaggtcaactttttgatccttgctatttgtatcagtgtgtttgttttttgctttttgtggcatctgtgttttcctctatttatttggatttctgggatagctagtgatttaagacatttgatgtcaaggtaaaaaattatcctctgtgatgaaagagagaacatgtttattagtttcactctggaggagattacaattcaaccacacgttaatgagttagcaaaatggtcagaatacatagtgtaaggaccaattcgaaagcataagaaaagagaaagagaagccacatatgagagaggtcagggggtgagaactggccatgtgagacaagggcaaggaagaatctcagagcctggttgtacaaggtgactgcaaaccactgcaccatatgggggagagtctgggggacccacttgaaagcagagttgcagggactgtgaaacaattattttgttatgctttacactgagcagacctggaatattctacttttcaaggaaagcaggatatgggaaatgtgtgtggaagtttgaaggaaagccgcaaacatgagtaaatgctaagaacattaaatctgtgtggactattttcacacaaaaatcctgagaaagtgtagaaaaaggaagaccaagtctcttgtaactaaacctcccttttggtggaaatgtagaatttcggttagatttcacaaggaatgtctaaaatcatctaaaatccctaaagaagcattgcttccaagtcatagtctggcagattgtatgtgttggttcaggcctgtggctttgctgagggatttcatggaaggattgaacactgcaacccctcgttgtgaatgaagagcttctattgcaggtataaggcagttgttcagcatggcacctgtatatgaaggatcaggaagttgataatacaaaatgtgagattatcattgttcattttgctggtaccatttgaaaggcatggctaagaaacttagtgttttggttagtcattctgtggatccagagaacccaagaaaatatattagttacagaaaaaagttttggccagaatctgacttttcatgatatctctcttcatgttagtatattatattgactaggattggctagagggtggaaaagctgagacttcctttgtggggctacacagggagcttctgagcagagacatgggataacatgaaaaagatgaaagatggcatgatgtataatgcgtggttggtcatttcatgaggtgaggctcctcatttttttttaatttttaatctctaactcaatagtacttttcagttttttacactatggcagaagaaaatatgacttcttattcagattttgcagctattcctctgtcttctcagttttcttattctattacatttctggtaagtacaatccaacccatcccccatctgcaggatattgtgatctgtgatgttacagtaggaatttgagaaagctatgctataatggaaggccacgctgtcacgtaggatatgtggggcagagagcaagaagtatcacccatccctgggacccagatactattctatgctttttggaccccccgttttctttcttagttagtaaaagaaatgtcgtgacagcttttcttactaaacacatactcatgtagtatctgtgaaattaaaagttgactaaggtgttaattcatagaggtcttcacagtgccctagattttgtttgttccagctcatatttcacattttgtctttcattatactttgcagatgttctgtgttattcttttagacatctggtaaggaagagacttactggatttctagttagtattttgcgacctagaactgctacttgagaaggaatgatcctatatcattcctcttgtagcttaaatgtagttttcattgacttacagcttttaaaagtctgcagtgcaagctgtgttcgttacagacttaacctttctaccatcttgttgcctgactctccgataggtcatttggctatagtatttccaacctacggttctccaggactggttcaactggaaggccaattattctaatcctttttcatggctctgtgtgatgctccccaaagctgtccatttggccaacaaggaaaatctacctatacaacagacaccctttagtatgtaagtagaaccatcaatacattatttaacgtagacacacagtctgtattagtcagggttctcttggttacaattcaaataaatttaagcaaaaaagtaatttattggttcacttaactgggaagcccagaaatgatgccttcaggcatgactgaatctgcattcatattctctctttaacagtatctcttactccccatgttgtttgtctgtctcttttctctgcatgatggtctcttaacttcttgctgctggcagctctttccatgtggccagagaagatggccacttgtaaccccaactatacaacgtctcaccttgacaacaagcagaaagaaaacagcactcttctctgtagctctgtatcaatctgagacaagactcttattgacattacatgcagcacgtgcttatgtttgctgtactcagtatattcgggggaatggagtactgtgattgactaggcctaggccatctgctcagcccagttacagagataaagaagcaaaactgataccccatcaaaagcatatagaatggaggaagtattttctttaaaaaattcagagtataggagaagggaaatgtgctacataatagaaattacgattgctacagtttggcacataagttgtttcctgttagtaactcttctgaggttgaatactgctatggtctaaatgtttttgtcctcccaaaattaatatgttgaaacgtaatccccaaagtgatgtgttagagtgcagggcctttgagaggtgattaagtcatgagagaagaaccctcatgaacaatattagcaccattatgaaagagactgcagagagctagctagctcctttcattatgggttataatggttataatggaaaggtgttcatctatgaagaagcaggtcctctctagacactgaatcagctggtgccttgatcttggacttcccagcctccagagctgtgagaaataaatttctgttatttataagctactcagcctaaggtattttgtaatagcagcccaaatgaaccaagacaaatgctaaaatctcataagctatctgacaaccattatcctattgtagtttgattggggatatttggatggcagagaaaagaaagtgtatctggactataaaatcaaagttgatgacttattgtttagcttcagttttctgtcacgggattttttttctgaccttcagatttcaaaagttactacgctgttatactgttacctgctgtaagatgattattaaatatcaaagtgagagatttttgttttgtaaattcatgccttccaaatgtaattttagatattataccaggcaaaagaatacactccaccaaataacataaaatctttaaaaattttcatacattttatatgttatggtctgattaaaattcatatttcctttcataagaactcaagataaacccagaggagaaaaattcgtgcattaatattccatgaatactggggatcagtaaatctagcaattttctttcaactacacgcgaggattggaataatatcatgtagaaaagacaattctggtttatacttataactcatgaaaatacatacattccaagcttggcaaagtacattttccaatttctcaaaaacatgtttagaaatgaattcaaaagggcatcagtggaaaaatagaggaaatactcttaccttgtgaaaaacaggagataaatgacaattctaaaatgtcatagtgccatattaccaaaatctctttcatgccttttattcacatgccccaatgagtgcatctata

SEQ ID NO: 715 - DNA, 45687 bp, Homo sapiens
cttcctttgcttttgctggattgatactaagtgcctgcaacttcaactctggttatctcgggtttatgagaacggctggcattcacgtgtctaatttttaaatgatagatgaattaattattatttgatacttgccgtgttggtaggccaaaaggtgggcttctgaaacttagagggtgacagggatggagacccctggtatggggcttagatgaagcaagaggccaggcccggaacagaactcagctcagcagtcagtcacaaggctgcagagtgacaggcgtttggggaaaggtaggaaccgctctccgccacctgccggtcagtagccctacccacaatcaggccgcggctgcctcggcctggtcccaaaaattgtgaacgccgccctctcctcccgcccagtcctccgccgcgcccgcggggtcgggggctgcgctgccggcgccgcgagccgggcgagcttcccagcacgggaggagggagggggcggcgccgggcggggcggagcttccgcgcctcctggagccttattcccggccgcgagccgggcagcgctcattcggccgaaggagctacgcgggccacgctgctggctggcctgacctaggcgcgcggggtcgggcggccgcgcgggcgggctgagtgagcaagacaagacactcaagaagagcgagctgcgcctgggtcccggccaggcttgcacgcagaggcgggcggcagacggtgcccggcggaatctcctgagctccgccgcccagctctggtgccagcgcccagtggccgccgcttcgaaagtgactggtgcctcgccgcctcctctcggtgcgggaccatgaagctgctgccgtcggtggtgctgaagctctttctggctgcaggtaagagggctgccgacgcccccggagatcggggggatgggggcgttgtgctgggggcatgggggaaggtcgccgcagcgcacccggcacgggccacttggtggggcccttgcgctctggcggacgggcgtcggcatcggtgcgtgttggtcaggggtctgggcgggtgtctgatgcggcctggcctctcgcccgcagttctctcggcactggtgactggcgagagcctggagcggcttcggagagggctagctgctggaaccagcaacccggaccctcccactgtatccacggaccagctgctacccctaggaggcggccgggaccggaaagtccgtgacttgcaagaggcagatctggaccttttgagaggtgggtgtggaggccccccatccttggaccttggtgggctgttgaagaataagcagatccaagattcttgctgtttgggcaatactgtgggttgagggtattcatggagaacctcggggaaaagctgatcggcctgatgggcactgggggatcctggaatataggtcccactctctctctcttgtcattgcctcacctgctgggttgctgcccttctgggtactccggggcaaattgaatcagacgtgttgtctggggttgttacgttcttcttaggtaagctgggtgataggaacaaggaatggttgagatgctttccctagagctactatgtaaaaatgggcgccagttctaattcccatatcaaatgactattatatataaaatagaggtaacacatgcggagatgcccaggcacatctctagaaagtgtgcagtgttggcctcctccatccacctgtctccagattggggaaacagaggggaatgaggagctcttggccgccctagatgaggctgtgaatggtgagcactgagcccctagggggctgtattaaaatgctggatatctgtgaatgctaccggaaacctgcagcttactgagcaccttgcattcctgaggagactccaaatggggagggctgtgtaggatcctccaaccagcctctttggctgtggccaagtacaggtacagggcagagtccagagcctgccagctctcctgcctccaaacctgaggagattatccagagtagagcaaggactcagcactgtaccctggaatgactatatttggttggacagatgcccacctgttctagttccacctgctcctcagctgcccttctccctcattcccaggagctttccttggatactctctctactttgtataaatcaagcacatactccaaaactgagcctgggctcccatacttcatcctctcccagtggccctctggggttgcccatgacctgaacagcctggattctcctggccctctcctcctaggctgggcagggctgggctgtgactcaccccacccccaccccccacccacacggctgctcctcttacctctgcagacctgactcactgctccctgtccatggcaggagcctggctgtcaccctgcaccttctccctcccctttctgattggcttggcccccctgccttgctctccccgaagctctggtcactgggttcctctgaccacctgtatcaccttctgagctctgagggggcctgggactggatgagaggaaatgaaagactgtgggggctgctggcacctacttctcttcccttcttttggctttgctgggcaaggactatttttcaggtctggggatcctaccacctaaaataaatgactgctaccatttattaaattcctactgtgttctaggcacttgatatgttatcctggctaatgtaacacttatagcaaccttttgagatagttactttggctatccacattttactgagaacctgaggttcagaggagttaagtgactgcccacagtaaatagctgaaattggagcacaggtctatggacttcagagcccattcatgcctggatcagcatctcaggtgctctagacttgtgagagggaggagatgggagtgtgtgaggcagcttggtgtggtgaggaaggacattggagtgaagtccagagaacacagttctaatcccaatcctgcatgaccttgagtaagtcactctgcctgccatgagttttttctttttttcttttttttttttttaaacatagtctcactctgtcacccaggctggagtgcaatggcacgatctcagctcactgcaatctctgcctcccaggttcaagtgattctcctgcctcagcctcctgagtagctgcgataacaggcacacaccaccacgcccggctaatttttgtattttttgtagagatgagatttttgccatgttggcaaggctggtctcgaactcccgacctcaggtgatccacctgcctcagcctcccaaagtgttgggattacaggcgtgagccaccgtgcctggccacatggtattctttgaagtccctctagcttgagactctaagtctctagtctaacgtatcatgcttacccttctgtaagacacatggctgtagccatggatgtgggcacctttttcctgatgggggataaaagggtgggattgggctgataggcatagtccctggtcaatcccagctggatatctgggtgaggctgtttttcccccagtctctctgaagcatggaaagaaggagggagtcatcattgttccagttccttctggacagttccttactttccatttttctatcccttgtacaccctgtaccccccaatccagagagctataaacaggacattgggggttaaatatgaatgaatctttgagaaagtgggtgagctgtaaagggtatgcaagttaaatattttgcttgaagttgaaaaagcaaggccgtgaccagggctggcctgcttgctgttcctgagccaggctctgccctgggctcatagtactaaggggtgccccagaagagaccacctgaacacatggacactgttcttatattaggagccctccaaccccagaacctccaagtaccttctctagaagcaatttttgtgtgtgacactgtctttctgcaagtggttcactgagtacagcatcaggaaatgaggctgattgaaggccaaaatagaatgaagtgggtgtgggggagtaggagatgggggtgtaaggtggacagtggggtggaggtgaggttggtagaattgcccagttactcaacaaaagcattctgagaatgaggctcttacacagagactgtgaaatgccttccttgggacccaccctagcttctacttcctaccgaggttccctctttctggtggttctgcccaatcttcctgctcttccttctgcctcttaggaggcactgagctaaggggccttcccagatctctgacttcaggtggaatcaaagcatatatactcctttcaagcactatgctcttctgattttcttcccaaagagtcagactttaacagagtgcttttctcctacagtcactttatcctccaagccacaagcactggccacaccaaacaaggaggagcacgggaaaagaaagaagaaaggcaaggggctagggaagaagagggacccatgtcttcggaaatacaaggacttctgcatccatggagaatgcaaatatgtgaaggagctccgggctccctcctgcatgtaagtgccccttccccagggctgaatctcatcagcacactttgtcagccacgtggctgttcctcgttgtcactgttccttgaattcataatttcacccagtttcttctcaacctctgggcggaagttgggaggaggggaaatatatttttagtcagcggaagccccctcccccctataggatgcaatttcctgtggtatggttttgtgacgtgctttaatccttggggacatttcctgcttgcccagaaatgagcatgtggctaggacagctggcacctgaaggcaggcccttaattcttgcctgatgccctactctgggagggagaagccagtaggaaacatggcagagtgggcttccagggcagagtagagctcctgtgggaaggtaggaagtgcatttggatgcatgatgtataggtatgtgtgtatttgggtttatgtgcatgtaagtgtgcaaatgtggattgactgtgaggcatggcaggactgtacagagagggatcatcatggcggcaggttgaggcctctctttcttcttccttatcccagcaaggacgaggaggtgggagacatggagagtactggcctttggccacgttgtgagagaacaattcctttgtgcagggttcacaggaaatggaacctgacccattaggcatcagcccccggtcaggcaacatcaccccttccctgggtaggtgtgtgggtggaggggctgtgggttccttagcctctctcctaagccaaacccagcaaacggctgccttggcaacccctcagggatgacagcactgccatgctctctggcaggcataatgttgccactgtgcctgaggccaacaccctgcgtcaggctgcaaacatccattcccttccctgtggggagggaggctctgggggccttagtgggagactctggacagggccaagagactgttgtatgcacactgcctccagcctgtcaagaaggcggcgtgcctggcatcccttctactggtgattggtgcagatcccttagctttttaaagcttccttgttttgtctgatcacacacagcagagctgccctgtatttggcagttggcagacagacccatcactccccaccatgtccacagtcacttgtgcatcctttcctataacatccttgtcaggagcttggtattagagggagttgtttaagagtggcatagaaagcccccatattatccttcccaaggtcttgggacagggtgggaaatgttcatcttaaatttgtaaaatggcatcattagtacagggtgaagaaggtgactcaagtagtcaaggtggattgaggtcaggaatctgtctataccagattggtcctgggcattttggtggatggatgtggggcttgcactgtgtggttgagaggccttataaggttgccctcctggagagctggactcggatgaccacctaaacccagagaacctgatatgggtgcccaggccaccttcccagtggtccctagggatagtgataactataatgatgtcatatctcctttgtcccagagtttcagtgtttatatataatatgagttgagcccaagtatgttgagcccctatttggtggcagacactactttaggagctggagagatatagtttcctgggatttttcaaaagccctctgctgagtaggcaggacttggtacctctacttgaaaggtgatgaaactggagccagaaaataggaagtaatttgcctgaggtcaatagctaaataagtagttggaaataagacagagtctcagtacctgactcctagtccaacatgcttttcatgccctcaagctgtactgggtgttggctttcatctttctttcctgtatctgtccttatagagttggagcagcattttatagagggcagagggcagctgttgtcctagaggtctcttattcttttactagtctaacagcacagcaatctgatttgaaaactttacattaacttcttgggcagaattttctttttctttgttcttttctttctttctttctttttttttttttttttttttttgagacagagtctcactctgtctcccatgctggggtgcagtggtgtgatctcagctcactgcaacctctgcctcctgggttcaagcaattctcctgcctcagcctcctaagtggctgggactacaggcacctgccaccatgccgaattaataatttttatatttttagtagagacgtagttttgccgtgttggccaggctggtcttgaactcttgacctcaggtgatccgcctgcctcagcctcccaaagtgctgggattacaggcatgagccaccatatctagccttttttttttttgagatggaatctcgctctgtcacccaggctggagtgcagtgacacaatctcggctctctgcagcctccgcctcccagattaaagtgattttcctgcttcagcctcctgagcagctggtattacaggcacatgcccccacatctggctaatttttaaatttttgtggagatggggtttcaccatgttggccaggctggtcttgaactcctaacctcaagtaatcagcctgccttggactcccaaagtgctgggattacaggcgtgggccaccacttcctgggcagattttcagggggttgattgcatgtctggactggccccctactgcctcctgcccttgctactcagggcagaaagcagcaagaagacagaaatcctggtttgggggaatgtgacatctgtgcacgttcatctggggatctttgtggctcttgtttgactccagacccaggaaccactagccagggtgtgtccaggctgctgtggtgagcctgaggctagctggcttcctaaactagccctctgcagccaccatgaacaggaaaaccctttttgtgtcaccagccaaaagttgccctcaaagagtagtttctgctgggcacagtggctcacacctgtaatcacagcactttgggaggccgaggcacgtgggtcgcctgaggtcaggagttcgagaccagcctggccaacatagagaaacccccgtctctactaaaaatacaaaaattagctgggtgttgtggcgggcgcctgtaatctcagctactagagaggctgaggcaggagaatctctcaaacccaggaggcagaacttgcagtgagccgagatagtgccattgcactccagcctaggcaacaagagcaaaactccatctcaaaaaaataataataataaataaataaaagagtagtttcctgggattcctgactagttgcctacccagaaattggctgcagagtttcctgtggctggaggaaaactggggacacttgggctgaggaggactcagagctggaggagagacaggctagggggctctacttggcctcactgcccaggtgctaagaaggaatggtgatcccgcttctcttgtctccatctgacttgggtgccccattcctcaggccatgggcagtaacctctggagtctgattatgtaataactcacacaatgtgggacttggcctttataaagccctttcatttgtattacctcattttatcttttcacaatactctagtgaagtaggcatttcttatccctgtgttttacatgaggaaaccaatgtttagaaaggtaacgtgacttgcccaaaattacctggctagaaatagcagcagaaccagtctggaactcatgcactcagtctcctccatccagacgtgtcccctccacctcctggggtaaaggtggagaaatccagtttggaagatgtctctggaccctagagggttcttgcatctgttgtaatacaagttctgaaatgggtcacagacgtgggtgggaagaatgtgtcctagtctggtgggtggctggctctggacaagacacaaaattttgcccctaccctgggatgcttggaatgtactcatcccccctccttctctggggaagccaggagttgtctgcaaagggagggggaggtaggtaatattaggatgtttacattattatccttttgactcagggtgggggtggagggattatgtaactgaattgcgggactctgaggccaaactttatttctatcttctgagtaactacctgtggagtttgaatgatggactggaagtgaaaaacagactcaacttcagcttccctcctcccaggaaagcaaagtctctgaagtcatccagactgctgttgaatcctggctctacgactcactagctttgtaaccttgggcgaggtgtttaacaaaagctaagcctcagtccatctttaaaatggggctagtaacttctccttcacagagctggctttaaatgaaataattcttgtaaagcagttagcacaaagtacttggctcatggtaagccttcaatgattgctaattattattctttattattcaagttatgagtaataaataataataacatagtcagagagaagggtcagactgccccccaggagcctatcagatatgcttccttggagttacctgcgctatcctgcattgttcaaagtggaaggaatgatgaatttggaatctgccaagacttgttcctagtcttagccctgctgcttcctagttgtgccacttttggtgaatcacttaatttctctgacccttaatcttagcttttccatctgtaatatggggttgtacctgcctaccagaatgttaggaggctcagttgagctagtagataaggctagtggcttgtgaatggtaaactgctgtgcacaagtgattttccaggggtgcttgtgcaagtgtcctctatgtcctggcaggataggggtcgcttttaggcctacatgggctgatgggacagatacatggagaggctgggcaaggaactgtggactgtgctatacgtatagtgggcctgacctacatttatcctgctgtgaggtggtttctcgaagtacccaggaggaactagggcagggagaggctcagggcaggaaagcaagaatgcagtaccacccagcctggcccctctgccactgctggttgtggacaagtctgtctcttggagcttccctggtgctctgtccgcaggaagaagggattccttgttctgaggtaccagagaaagcacctccttcccagagaaagcacagctcagaaaagagggccaccaggttcttggtgcttccttcagcagctggtggtctaaagtcctcaggcagacagtgccactgtgccccctggctggatggtaggcagttgtcaggtgtgagtgggcagcacactgagctcagagtcagacaatctacatctacatcttcatttctgtcttactgtgtgaccttgggaaaaccactccacctttctgtaaaacagggctcctacttatatcaaaggatctctgggatgctcagataaaggaaaggatgtgaatgtgcttcttcaactgtaagcacgtctgagtctttctaagagcttcaaggaaatgctttgtgttagaaaaggcagttgccagcccggtgtggtggctcatgcctgtaatccttgcacattgggaggcagaggcgggtggatcacctgaggtcaggagtttgagaccagcctagttaacatggtgaaactccgtctcttctaaaaaattacaaaaattagctgggcgtggtggcgggcacctgtaatcccagctacttgggaggctggggcaggagaatcacttgaatccggaggtaggggttgcagtgagccaagattgcgccactgcactccagcctgggagacagagcaagactctgtctcaaaaaaaaaaaaaaaaaaagaaaaagaaaaagaaaaggcagttgccatgtgatttatttcttgagtgagaagagccaagggattgtttctgacagtcttccatgctctggcagggcagctgggcagaaagatgtttcttgatttgtttggtttgtcctgtgatgaaagaggcctggtagctcagcgtgcagaggccaaaggccagagttgagctcccaagttgggccctgcacccagggggagctggagttaaatgaaggaaacttgagaaaaacgactcctggcagaggcacagggcctattaataggctggacagcagtggagagggactggacgctggaagcacgatggggaaggctgggtttatttctgggtcagaatgttgaggggcctcactggagggagtgatacgaattccctcaatttagcctaccagctcttgtgcccaagccctcataagtggcttaaacagaacgcctgaacacacatgtcataaatcagccacacgtggaacatatctagctgaggccttcaagtcctcccttgctttttccatgcctagaacaggattctcagcccagagaaccagaggaaatggaaaaggggagggtgtcaagtgagagaggaatgctacagagctttcagaggggctttaaagagttttctactagaggagaaggatggaggatgggcagggatcgtggtcagggattgacaggctgagggtatgaggaatggggtttggcttatgcaggtgggccattgccaagagaggccaaagcactaactccatctccttcttgttctgtcttgaactagctgccacccgggttaccatggagagaggtgtcatgggctgagcctcccagtggaaaatcgcttatatacctatgaccacacaaccatcctggccgtggtggctgtggtgctgtcatctgtctgtctgctggtcatcgtggggcttctcatgtttaggtgagtgttggggtcccctgcaggctgtttctgcaaatcactccctttcttcctcctcctgggccctctccttgatggtcacatgcacttccctcaatctttccaaatcatgggctagctccggggtgtagattctccaaaaacctggtatttctggcatgacatgagtcctgtgtctagagcccagggtcaaatttgcgaggccatagcaggttctgctcctcacaggagttcttttcctgcctccatgacccagctacccactcatggagtcactttgtcacacatttctttctcctggctgttctttgatggcattagtatgtggtttggtagtcaaggtgtgggtggtgctagtggtatatccttccacttctgaggcgtctggacctcaggccctgctttctaatccaggtatgctctagcttgggagacccaccaagcactctatgcctgttttctttctttctttttttttttttttttttgagacagagtcttgctctgtcgcccaggctggagtgcagtggtgtgatctcggctcactgcaaactccgcctcctgggttcacgccattctcctgcctcagcctcctgagtagctgggactacaggcacccgccaccacacccagctaattttttctattttttagtagagacggggtttcaccatgttagccaggatggtctcgatctcctgacctcgtgatctgcccgcctcggcctcccaaagtgctgggattacaggcatgagccaccgtgcctagctctatgcctgttttcaagcagtgtaactcatctgtcatgagacctggaacaagttactgtctttctgaggattgtaaccttgtagtgattgtaatgtttgtccatctacctcataaggatgttgtgaggatcacgtaaatgaggtgaaagctatttgtaaattgcatcctgctattagagacaggagttcctcggggcagttgggcctttgaccagagtttgggctgccctactgcctgggcttttccaagtagtagaggaaaccaccatggcagagttctttggaaggacctgctctggacctgcactttgtcatagcaggcagggcttattcacaaaacttatcttcctcaggtaccataggagaggaggttatgatgtggaaaatgaagagaaagtgaagttgggcatgactaattcccactgagagagacttgtgctcaaggtaacgctccatcctttgccccatgacatgattatcctttgtcccctttcctggctgtgcttcagtgggtgctgaattcttcatataggggttgggggccaggctactgtgacattaatatcccattgcagaattattttcaaaaagactcagtgcttcacttaaggtaaaagttgctagagagacacctaagagagatgcctgagaggacagcttctcccaccctcatcccctcccttcccctcccctctcctcccctgggagacagagtgaaaccctgtctcaaaaagtttaaaaataaaaaagactggaccaggaaaatcttaagacttctttagactggacctggctttacatgccttccttttgtgctttaggaatcggctggggactgctacctctgagaagacacaaggtgatttcagactgcagaggggaaagacttccatctagtcacaaagactccttcgtccccagttgccgtctaggattgggcctcccataattgctttgccaaaataccagagccttcaagtgccaaacagagtatgtccgatggtatctgggtaagaagaaagcaaaagcaagggaccttcatgcccttctgattcccctccaccaaaccccacttcccctcataagtttgtttaaacacttatcttctggattagaatgccggttaaattccatatgctccaggatctttgactgaaaaaaaaaaagaagaagaagaaggagagcaagaaggaaagatttgtgaactggaagaaagcaacaaagattgagaagccatgtactcaagtaccaccaagggatctgccattgggaccctccagtgctggatttgatgagttaactgtgaaataccacaagcctgagaactgaattttgggacttctacccagatggaaaaataacaactatttttgttgttgttgtttgtaaatgcctcttaaattatatatttattttattctatgtatgttaatttatttagtttttaacaatctaacaataatatttcaagtgcctagactgttactttggcaatttcctggccctccactcctcatccccacaatctggcttagtgccacccacctttgccacaaagctaggatggttctgtgacccatctgtagtaatttattgtctgtctacatttctgcagatcttccgtggtcagagtgccactgcgggagctctgtatggtcaggatgtaggggttaacttggtcagagccactctatgagttggacttcagtcttgcctaggcgattttgtctaccatttgtgttttgaaagcccaaggtgctgatgtcaaagtgtaacagatatcagtgtctccccgtgtcctctccctgccaagtctcagaagaggttgggcttccatgcctgtagctttcctggtccctcacccccatggccccaggcccacagcgtgggaactcactttcccttgtgtcaagacatttctctaactcctgccattcttctggtgctactccatgcaggggtcagtgcagcagaggacagtctggagaaggtattagcaaagcaaaaggctgagaaggaacagggaacattggagctgactgttcttggtaactgattacctgccaattgctaccgagaaggttggaggtggggaaggctttgtataatcccacccacctcaccaaaacgatgaagttatgctgtcatggtcctttctggaagtttctggtgccatttctgaactgttacaacttgtatttccaaacctggttcatatttatactttgcaatccaaataaagataacccttattccatagccttttgtctgtttgttttaaccgggaactggtttaacttagttatttcctaagccctgacttggtggtaggctctataccaggcctatttatgtatactaccacaacaattctgcgatgcaggtactattactgtcccatttttccagaaggggaaactgaggctcaaagtggttgtgtaacttgcctgaggatacacagctagtaaatgacagagctgggactagtagtctggctccaattattttgtcttagtacttataccatgctatctctgagataagaaagaacagatctttcgcacagcatgtttagctggctgtaatcagggaagatatccacccattcagtcaacaggccctggactcaggatctactcctatgctgcacatatgagcaggcattgcttctggcaagaacaagatgtctttgactaccctatcttgctccacagccaatccatcagcaaatcttgtcagccctacctttagaatacatgctgtatgcaaccacttctcatcactgccactaccatcacccagtccaatttcgcatcatctcatgcctgcacttttgtgatggcctctgcctttctagttccatcttgcttccatataacatatttccagtgtaatagccagagtgatcatgtctttcagatcttgtctgctctgcaggccttccctgaccaccgtattaaacaacagcacattccttctcccatcctactcttactcttcttacattgctttttatcaccactaacatattcctatttgtttatagtccatctcctcctatgaaaatgttagctccatgagggtaggggtgtgtacattgctcctctcctagattctaagacaatgcaattgagtggtaggcactcaatatttgttacctggatgaatgaatgtaggaaatacaattcagtccaatgccagcaagtggacagacatgcaatccaatgctgccctgaaagtgtgattggattagagaggggtctctgttggggaatgtggatggtggtgacaaaatgaaagtggaatttggggcatgtcatgtgtcctggtggattggacagtccatcaagtggactggggcagtgcagtagcactggacaagtgccactgggctgccccttcctcatcctcttcccttgcagagttgtgatattctgaagtttctccaggagcccacacggagatcttgtatatacttggaacatcctttcaagactttaggcactagtaactattgaagctgaacatatgcataccccaggagtaattccacttctggggattcaagagaaatgagtgcatatgttcaccagaagatatgcacaagaggctgggcactctggctcaagcctgtaatcccagcactttaggtggctgagacaggtggatcatgaggtcaggagttcgagaccagcctggccagcatggtgagaccccgtctctattaaaaatacaaaaacttagccagtcatggtgatatgtggctgtagtcccagctactttggaggctgaggcaggagaattgcttgaacctggcaggtggaggttgcagtgagtggagatcgcgccattgcactccagcctgggcgacagagtgagactccttctcaaaaaaaaaaaaaaaaaaagatatgcacaacattaatccaagcattatttataataactaaaaactggaaaccatccaaatacccatcagtatttgatgataaaaatgaataaattggggatatatctatacagtgaagtactaaatagcaataggaatgagttgcaaaacatattgctcagtgaaagaagccagattcacaaaaaagtatatactgcgtgattccatttacttaaaatttaaaaacaggcaaaactatggtgaaaaaaaatcaggaaaaagactcccatcgtgatcagtaaagactggaagagagggacttctggtgttctgataagttgtgccatggttgggatgcgggctacacgagcgtattcactttgagaaattcaccaaatatgaatttttagggccagctgtggtgggtcacatctgtaatctcagctctttggaaggcagaggcaggaggatcacttgagcccaggagttcaaggccagcctgggcaacatggtgaaaccctgtttctacaaaaaataaaaaaattagccaggccaagcgcggtggcccacacctgtaatcccagcactttgggaggccgaggcaggtggatcacctaaggttaggagtttgagaccagcctggccaacatagtgaaaccccgtctctactaaaaatacaaaaattagccaggcgtggtgacagacgcctgtaatcccagctacttgggaggctgaggcaggagaatctcttgaacctgggagacagaagtttgcagtgatccgagatcgcaccattgcactccagcctgggcaacagagtaagattccatctcaaaaaaaaaaaaaaaaaaaaaaaaaaattagccaggcatgatggtgtgtgcttgtaatcccagctacttgggaggctgaggcaggaggatcacttcagcctaggacgttgaggctgcagtgagctgtgttgtaccactgcactccagcctgggtgacagagtgaggccctgtctaaaaaaaaaaaaaaaaaaaaaatttaaaaacttgaatagggaactcctttgctatttgcattgcataaagttctatgaagtaccaatgtattatctgtggtaatcagagagaataataaagacatcagaaataactggagtagtgagttactttgaactctcctggggctccctttcctgcttccaagctttcagtctcaagctcttgtcctgagctgggcttttccaagcacactttgtttctccagctaatgtttcctgcaggctcagggcttcctgcctttcaactgctcgctcctctacccctgtttctcatgggaattcccttcagcagaggtcctctggagctcctctgggcatcttcttggtttatacagtggccctaggagcctctgaacctgcagccatttctcaagacgggctgtcagaagaaatctggccctccctgagcactaaaaagcatctacctcttctctctgggctcccctttcagcctcctttgagaaactttcttttatagtgttcataataatcattattcgcttaataaacatttaacatttcatggaatgctcagtatgtatcgcacactgggctgcacactttacaggcactatctcatttacatctcaacacaacttactgtatccgtgttatagatgaggaaaattgagaagcaattgagagatgttaaatgtatgcctaaggaaagtggtaaaggcagaatgtaaactcaaggagcctaattttcaaaccttcactgtaaacactaagctacattcctaaatgagctctctgtcccacagttgttttctcttttcccatatccagaaataatatgatggagaaataatactaacaggaacttaatggctggacacagtcgctcacacctggattcctagcactttgggaggctgaggcagaataatcacttgaggccaggagttcgaggccagcctgggcaacatagtgagaccctcatctctaccagaaaaaaaaaaatgtaaacattagcctgatgtggtggcatgtacctgcagttctagctacttgggaggctgaggtgggaggatcctttgagcccaggagtttgaggttgcagtgagctataatcacactgctgcactccagcctaggcaacagagcaagaccctatctcttaaaaaaaaaaaagaaagaaaaaaagaaaaaagatcttagagagcaactccttagagctcaagggtttctggggccagaacagtgggtcatgtctgtaatcccagcactttgggaggctgaggtgggcagatcatttgaggtcaggagtttgagaccaggttggccaacatggtaaaaccctgtctctactaaaaatacaaaaattagctgtgtgtggtgctgcactcctgtaatcccaggtacctgagaggctgaggcaggagaatcacttgaattcgggaggcagagattgcagtgagccgagatcgcaccactgtaatccagtctgggtgacacagcaagactccatctcaaaaaaaaaagagtttcttctgttgcccccagttaacagattcctgaaaggtggcccaagaggtcttgtcagggggaagtggaagaaaacaggaatgcagactgacctaaacgtgtggctgaatccagctcccactgttatcagggaagtgccctcacacgtgacacctaacctctctgaacctgtctccctgtctataaaatagagacactaaaaatatttaccttaaagagttgcaaaaattttatgtgtgcctgggcacagtagctcatgcctgtaatcccagcactttggaaggccaaggcaggcggatggcttgagctcaggagtttgagaccagcttgggcaacatggaaaaacccctctctacaaaaaatgcaaaagctagacaggcttggtggaaagcacctgtaagtcccagctacttgggttattgaggtgggaggatggcttgagcctgggaggtcgaggctgcagtgaaccgtgattgcaacactgcactccagcctggacaagggagtgaaatcctgtctcagaaaaataaaaattatatgtgtgagtaaagtgcctagctcagggccaggcatgagctagatactcagttaatgttggttatcttaagcgacctgtccaaggagctaattacttactgtagtctcacatctaggattaaaacccaggcttctgattcccagtctacaattctttccttataaacaaacaatccttttctatcactgtttcatattttaatgtcaacttcagtttcaaaggagccctaaagggtcttaataagtatctctggatttaagaagccatggaacagcaactctgtacaaaaatatcacttcaactcggctgccctgaaattcttccctttgtcaacagtgcctgaaattcaagcttcctgtttgagaatgctaatcctcctgggaatagctatgcattaagaggctggcattctttgatggtgtaattcatttcagcttcattcattcagcaaatgtttgtggaggtctccctatcaccttccgaatgagatccatgctctgaaggagagggcattttgacagagaaaagaaagagaagtgattttggagcaaggacattaatttattcacccaaaaaattcactgggtactgataatgtgccaagaactattctttttttgttttgttttgttttgtttttctgagacagggtctcactctgtcaccctggctgcagtgcagtgcagtggtgtgatcacagctcattatagctgcgacctcctggactcgagcaatcctcctgagtagctgggactgcaggaacacaccattacccccggctaatttttgtatttttttgtagagacagggtctcactatgttgcccaggctggtcctgaactcctgggctcaagcaatcttccctcctcagcctctcaaagtgctgggattataggcatgagccactgcgcctggccgcaagtactattcttgtcactggagaagaaccacggacaacacacggcatggaccaataatacatgcatagataaagaaacaggacagtttcagaaataagtaacatgcacatacacacacaccagtggtgtgctcaagagtaggtgggtacagaattcatttatgtaggtgcctcaaggaagctctctctgaggaggtaccatctgaaccgagacaggaagggatcatgcaggtgaaggccctgagacaaaaataagcaaaacgccaggcgcagtggctcatgcctgtaagcccggcactttgggaggccgaggtgagtggatctcctgaggtcgggagttcgagaccagcctggcccacatggagaaaccccatctctactaaaaacacaaaattagccgggcttggtggcacatgcctataatcccagctacttgggaaggctgaggcaggagaattgcttgaacctgggaggtggaggttgcggtgagccaagatcgcgccattgcactccagcctgggcaacaagcgcaaaactccgtctcagaaaaaaaaaaaaaaaaaagcaaagcatgtgtgagggacagaagggagcccctgcagctgcagcacagtcatcagaggttgaagatgcaaggcaaggaccatatggggctttgtaggccatgacaaacaatttggaagcccatgcagtgttttgagtaggagagtgatataatttaatttatatgtttcagaaatatgactcttctatgcagagaacaggttctaaggggcaaaagtaaaagaagcaagacaaggagctgggcatgatggcagatggcatgcctgtaatctcagcaatttgggaggctgaggccagaggattgcttgagcccaggagtttcagaccagcctgggccacatagcaaaaccccatctctaaaaactaaataaataacaagaccagttaggagaactttggagttatctaggcaagtggcgatggtagccagaattagggtggtagcagagggtgggaaatggtcagattcgggatatgttttggaggaatcacctgtaagacatgctaatggattaaatgtatgtgttgtggggaagaaggtaatcaaggatgacttcttagattctagtctgagaaactgggtatacgatggcactattaaaatgggaaggaatgggggaagaagcaagttcacaggggccatgaaaatcaagaattatttaagtccatatggggtggaggggactaccgagaaggcagtgcaagaaagggggatgcaaagaggagaaaaaagaggtagaagaggctgagcatggtgacccatgcctgtaatcccagcactttgcaagttcgaggcaggaggggggacctcatctcctcatctctacaaatcatttttaaaaagaaaaaaacttagccaggtgtggtggcacatgcctgtggtcccagctatgtgggaggctgaggtgggaagattgcttgagatcaggagttcaaggctgtagtgagctgtgattgtgccattgcattccagcctgggtgacagagcgacaccctgtttcaaaaaaaaaaaaaaaggcagaagaggtaaataaaaaggacctgaagacaggaataaataagggcatcaggagggtaggtagtattattttcccagtttaatgaggagggccctgaggctcagcggggtgaaataacttgcacaaggatactattttattagctaatgcaattttgcttgatgccaaccttgtgcaggagggcccaggcttctcattgcccatgaacttctatcctggccaccattatccagagaggagagaacaaagttctgtgttttcctccttgctgtggtgaggaacccaggccagactgtgttgctccatggagaccaaccccagaaaaagaaaaagggctaacgtcatccaagagcaggaggaagtgagggttgccccttcccatgattggtttccagagtgtcaggccatcaccaaattaatataatttggaggttgttgtggtttgatttttctttttgaactttttaaactgcacattttttcttgattgcccccttgattgatggagaagagaacagggacctcttagctcactgccacccacacagctgtgaaagaagccagctgccctcttgctcttcagagaatatcccttcctccctccctctctctctcccttcttcccacccagcatcttggctattactaaccaacagggcatgtaaggaaaagggctcctttcagggctggagtgctatagttggtggatcacagcctgtgtgggaggcttccccaaagacatatgatgtgggtgtaggaaccagacagacgggaggaattaagtcacccttttccccaaccctaattttcttgcccaacctagaagtcactgggttggtttccttatactaaggcagtaattttatttctactgtcctctagcttttgacagtgggcagtcttcaatgggagtgtgaaaggaggaagaagctagcttgttctttcttcatgccactagagtctgggttaaggacagctgtgtaaaccatgtactcacccagggttctctaggaaagcctgacttctttctattttgtcggtggtacttggtcagttgggcgtccctgggaagcattgtgcttggtaaggggggcctgatcgggtccatttgagagtaagtgttctctcctgcctgtggatgtaaatccaacccctggaactccaggcctgagaagtgtgacccaagttcaaccccttttacaggtgtgtgtttggacaccttccggagaaagtctgctgcccacccctgtcccagctgggttagtttctcctcccctgtgctctcacacctctgagccttggacaatgcaaggaaaaggagtcctcttcccatagcagctttgctgctcctctcccatggctttcatcacaccgcatattgtcattgtttactcatccatttctcccactgtgaactcttggaggttgtggagtgtgtccttttacacactgtgtcagcacaccagaggctttccctaaatgtttgatgcatgcatggatggatggacaattgaataaatgaatgagtgcatgaataaatggatgagtgaaatagagtagaggtgaaagtttcaggctctagatcagacaagcctgggtttgaatcctcgtcatgccattttctggttatataataatctcagataagttatttaacctctcaaagcctcaatttttttattaaggttttttttgtggagattacagtgcctgtaaagcatttatcacagtgtctggcagcatggagtaagtactcatacccgaaagcttttactattcttaacaagctttgccagtttttaccatcatgggtcttgtttgcacctccttttctagatttttggcacagtgggtctttgccagactcaagggttggcctgcagggctgcccacatgggtacacgttggggtcaggcaatgtaaaaacagcactgagttttgctgagaaggggaaaccgtgataggggcctgtctaaaaccaggcaaacaggtcaactgccaaccccattgtctcaggccttctctgctggcagcgtgctcaagaaaacaggaacagtgtggcatttaaggtgcctggatgacagccacatcaaatatgtgaccttttcctaggaagcctggtttccatggtgagctcgttctcaatccatgctctgtggctctcagccccctctggaatgtgacagcagtggccccagcagccgggtggggacatctgcctagaggttgtccctccaacatctccagggtggaggaggagctgagatagccccctgggctgtctgatgcccacaccagccttccaacctggaaggatttgcactgaggccctgacactgcctccctctgctccccttctcccacacatggctcatggccaactggctgccagcctgagcagaaagaaggggtctctttctgtgaacccccatcttagacagaggccctgaccccctccacctcatcttggcagcctgagattggagagagtgtctgccgccctggccttggcagagcgcgtgctcagcccagcccctgcagctgccagaacaggagctgaatgcccagtgtgtctgccagagcttgctaacttctttcttctttctctgagctatgaaaacagaggctgctgaggaatgtgactgctaacctccccaccacccgcctccctcctcctggggcttgtgttcccccaaccccccaagctggagtcacatcagaaaaatgtaggggaggaaagaaatcccccaatgtgtcatgacattacatttccgcctggacctcagaaacaagaaaagttagaagcagagggagaagaggggtggtgtggtcattgccagagccctgtgactgcttcacctcctgcctccctggggcagatcacttgctcccttggggatctgtctcctcattaataaatgggggcagatcgggcctggtggctcacacctgtaatcccagcactttgggaggccgaggtggggggatcatgaggtcaggagttcaagaccagcctgggcaacatgttgaaaccccgtctctactaaagacacaaaaaaaattaacctgggcgtggtggcgcgcacctgtaactccagctactcaggaggctgaggcaggagaatcgcttgaactcgaggggcggaggttgcagtgagctgatatcccaccattgcactccagccaggacgacagggagagactccatctcaaaaaaaaaaaaaaaatgggggcaaattgctttgactcagatggcagacaaactcagaattacctgtttgctgtcattgaatagcacggatatcactaagttggtaattattgagtgagtgtactgctcacgcatactcatttaacagacatacggggattcctccttttttctggaggctaagaacacaagggtgaacaggaccgaggccctgccctccgggaacttgcacttgaataggaaaaatagacaattaagtcacaagaatcaaatgtcaagagagttgtgttgggcaataggaggtgccaagttggctgacctggtccaagggtcagggaggtcacttcttggaggaagtgaaaatcaagctgaggcctgaaggatgagcagttgtgatgcaagtaaagaatgggggttgaagtattctaggccaggggaacagccagagtgcagagggaggatgatgtgaatgaggaacctaactggtgtgacaagagtgtacacagctggcttggggtcagcggaagaggctgcagagacaggccaggccagatcatgcaaggcctttgagactgtgccaaggagcttgaactgaatcctcagggcggtagggagccagccctgagtgttaaagtgagtgtgggtaggggtggcatgcttggatctgttttggggtggatgactccagctggagaatgggcttgaagggtagctataatcaagcagggagatgggttagctggagactgtggtggtatttaggcactgatggtagcagcagtggagaagaagagaagatatgaattcaagatctatggaggagatatgtggaggatgagagaaagggaaaagggcccaaggtggctctgagttttaggcttgcacgcctgggtggaaagtggtgccatcttactgagatgggccacactggagaaggagaagctggtgcgggtgaaagtagcaagtccagttttggccactctaagtctgaaggcatgaccaccatgtcagtagggatatccagtgcatgggtgtggagctgagtctggaccccaggggaaggctcaggcttgagtgaggtcattggcctggagagaataagcaagtgtatcatcaaggtggccaggcatggttactcactcctgtaatcccaacgctttgggaggccgaggcaggtggaaaccaggagtttgagagcagtctgggcaacataatgaaaccttgtatctacaaaaagtacaaaaattagctgagtatgatggcatgtgcctgtggtgtcctggctgaggtgagaggaccgcttgagccgcaggaggtcaagcctgccgcgagccgtgatcacaccactgcactccatcctgggcaacagagtgagtccctgaattaattaattaattaattaatttatttgagacagagtctcgctctgtcacccaggctggagtgcagtgacatgatctcagctcactgtgacctctgcatcctgggttccagagattctcctgcctcagcctcccaagtagctggtattacaggtgcacgccaccatgcctggctaatttttgtattttttagtagagacggggttttgtcatgttgatcaggctggtctcaaactcctgacctcaggtgatctgtgcacctcgacttcctaaagtgttaggattacaggcgtgagccactgcccccagccaagagaccctgtcttaaaaaaaaaaaaaaaaaaaaaaaaaaaagaatgatgctagctgctctaacagaaaattccccagcctcgatggcctagcacagtaggttatttctcactcaggtaaaatcccaaactggtgttcctaataagtgagcaactcttctccaagtggggttcaggaaccaggtccttccagcttttgtgtctgccatctttttttttttttttttttgagacagggtctagctctattgcccaaactggagtgcagtggtatgatcatagctcactgcaacctctgcctcctgggttcaagtgattctcgtgcctcagcctcctgagtagctgggatcacaggtgtgtgccaccatacttggctaatttttatatttttagtagagacggggtttcgccgtgttggccaggctgctctcgaacttctggcctccagtgatctgcccacctcggcctcccaatatgctgggattacaggcatgagccactgcacccgacatctgccatttatattacacagcttccagggtcactgtgatggggaaagggcataagggcatggaggaccacacatgggagagtctatcacttccatccatattccaccaataaaatctcatcatgtggtcacatctaactataagagaagtagggaagtgtagcctagctgggcacccatgagaaagaggaaatgtgttttgcaaccaactatccagtctctaacactggaaggcacaggagtggataagatcacttgatgagtccagggcttgcactcattcatttgtccctatttgtaggtgtttacacagatacaggacagacagaagtgaaggtaagccacttcctccccttccttattggagaccaacaggacaggataggcctcaacccattttagtccctcctgcaagttgagcaaacctctagggtgaaatgattccacggtagttagtttgttggctctgacactggccactcctgtctcttccttcagattggctgccattcaccctcactttcctttccttctcctcaataagcacttgttgagtatctgctatgtgttggggcccattctggaaatgcagcagtgaatgaacctgcggttcctgtattagtttatttgtgtattgtctgcttttcctactagaatgtaagtttcataggtagaatctgtgtcttatcttgtctaccactgtatccctagcacccagaataatgcctagcacatagtaggaactctggaaagaattgtcagataaatgaatggttgaatgaaggccctttgggagtctacatctgtaatgagtgaaaagggaagaacataggtgacctaggttcacctgtggcatagtgacctaatctggctcaggaagtcaaggggggtgggtgttcctggggaagagatttttaaatttttatgtgtttatttgtttgtagagacggagtcttgctgtgtggttcaggctggtcttgaactgttggcctcaagcagtcttcccgcctgggcctcccaaagcaccagaattacaggcatgagccactgcactcatcctgggaagagatatttaagcctagagttatggatgagtaggtgacaggcagatggaagagcatatgcaaaggcctggcatcaaaaaagtgcgtggagtaataaagttcagcgtggctggggcctagagggagtggagggagcactgcaagatgaaacagatgggcaggcagggacagatacatatggcctgtgcggaagcctctatttgtcctgagggtgtgtcactcagcagcttctttgatatgcagccattgtatttcaggtcattgttcaaagagggcaatttttgactttattattgattctcacctcactgtctcaataatgtttgaactggggtcacaattgaaagttatctgcctggccgggtgtggtggctcacgcctataatcccagcaccttaggaggccaaggtgggcagatcacctgaggtcaggaatttgagaccatcctggccaacatggtgaaaccctgtctctactaaaaatacaaaaattagccaggcatggtgccacatgcctgtaatcccagctactcgggaagctgaggcacaataacagcctgaacctgggaggcagaggttgcagtgagctgagattgcgccgctgcactccagcccaggcgacagggccagactccacctcaaaaataaataaataaataaataaataaaaataaaaaaaaaaaatcccagtatctttctgaccctgcaccccatgcagagacctcttttcttttttagcaaaacagacactgatactctctttgctgaagggggtggggaaacgaacaactgtctccatttatggaagatctcatttaattatcacaacagccctggaagcttggcattattatccccgttttttagataagtgctaaaagaaatgagaatctgcaataaggctcaagtgaagtgcatctctccagactagaggttttgaataaaatgctagtctttattggaagagtaacaacttgaaatggcactggcaggcttcagactggtagagtttgagaatggaattgcaagggagccaacagtcagatgagtcaggttagtcgagcatcagaaagtgctcatcaaggacttcccggatgcccagcccagcattccagaagagcaaagccctgtctccattctcaaggagctaacagtccacgggggagacacacagacaagacatggtagtttcaatacgctgtaagaagttctcaccgaagagaacaattcatgaaccaatgctaggggagtccagggacatctataaagtttactatgtgctcagtgctgagtgggagcatgggagatgtacaagagctagcagtttagatattaacccaatctctcttcttttgacgccctttcctttattccaccaacacctataaatggctgattgtgtgccaagtattagggataaagcaataaatgagtagatacagtatccaccctcagtctaatagaggagacagctacttaataaataatcatgcagaccctcaacaatacctagaagatctttgcagggatgcaagagtgataagagtatttgcctctgggaaggagaactgagaatcagagggccaggagcagaagctaattttcttttcctagtatgctattattactgtctgtattttatatgcgggtattttatgaattacctttttttaagtgaaatttaataatcatcacacaaataaatatgccattaaaaactgtgataaatgccatgatggaaaagtttaaggtatctgagagggtaacaggaggaactactttattttattatcattcattttttgagatatggtttccctctgttgcccaagctgtagtgcactggcttgatcatggctcactgcagccttgacctcctggggctcaggtgatcctcccacctcagcctctgagtagctgggactacagacaagtgccaccatgcccaggtaatttttgtatttcttgtaaagacagggttttgccttgttgcccaacctggtcttgaactcctgggctcaagcaatctgcccaccttaagctcccaaagtgctggaattacaggcgtgggccactgcatctggccaggaattgctttaagttgaggagtcagttaaaggcattttcatgaaaaggtcactgaagtgaagacccacaggtttaagttgtaggtgaccaggcagagtgcagggaagcattctagaggaggacccagtgtatataaatcctggaggcgaggcgatgcttggtgtgttccaggaatctgaggaaaccagtgtgatggaaccactcagatgaaggaaaatatctttttataaccccaattcattctatgaatgaatccagcacctatgttaggctggaagggtgatgaagacagggagagtatctattttgttcactgctagagcagtacgtagcatcctgtaggtaattaagttcttgttgcatgcataaatgaagaaattcaaactataaaaatgtcaagtggtggatttgcattaatgctctactgcctaagagttggggatttatcgaatccgagaaccactggagggtagagtcagggaaaccaagtataggctaaacaagtcactgaaagagctgatatgtctgggtataagctgtggtcacaatacagtataacagaaccatggccttctgaattctattgttttatttatggcttgttgggtttcagcgccctctctttaccaggaattctaattttatctttaccataaacacctgaagtgtttacatcagaatggctttaaagtgccaagtgctgaggtaattttttcttctcccttctagggaaaataataaagaaaattaattaatattaacttcattaatattttcattaattaatttcattaatattttcttctagagctgcagtttctaagcttggcgagcttctaaaaagtgcagattctctgggccccaacacatatccactgaatccacctctccagtaggaagggcccaggtatcagtgcttttaaatctcttctggtaattttaataataagccaagtttggaagtgtcactttagattagtgtttcttgggggttttttggtttagtttttgtttttggtggggggtgaggacagggtcttactctgtcgcccaggctggaatgcagtggcataatcatggctcactgcggcctcaacctcctgggctcaggtgattctcccacctcagccttctgaatagctgggactacaggccccgcaccactatgcctggctaatttaaaaattttttagaggcagggttttgccatgttgcccaggctggtcttgaactcctggactcaagtgatcctcccacctcagcctctgtgcccagcctagagtagtggttcttaacctattgagagtttggggcccctttgagatgctgaggagattatgttcatcctgatccagaaaaatacctggcagacacaacatttagcatacactgccaaggacatcatagacatcctatggtatctacgaagtacctagaattcccaatggataggccaagtcagaaggaacaccaagtttgtcttgcccctgggaagcagagtcctggggctttttctacctcatcttctctttgtgctcaggggttgaggcccttttctttcttttttttttttttgagacggagttttgctcttgttacccaggctggagtgtaatggcgtgatctcggctcactgcaacttccaccttctgagtttaagcgattctcctgcctcagcctcccaagtagctgggattacaggcacgcgccaccatgtctggctcattttgtatttttagtggagacagggtttctccatgttggtcaagctggtctcaaactcctgaccttaggtgatctgcccgtctccgcctcccaaagtgctgggattacaggcgtgaaccactgcgcccggcccatagcccttttcaagatccacacatttgagtgcaaccaacgataagtggctacaaaatggaatctcatattcccaagaaaaatggagcctcctgactccaaatttgtctcctgttttgggacccagtagtcttgctgaatccacccaagagaggccacagggtagaatggaaggaactctggaagagaatctgtgactcctgtgttctagtcttagccttaacaccaatttgctgtgaccgtggcaaagcccttcttcctttataagcttcatttttctctgtaaagtgaggatagcctggaagaacccaacaacccattccagctctctgagtctagaattattttctagaatttttttttttttttttttttttttgagacagagtctcgctctgtcgccgaggctggagtgcagtggcgtcatcttggctcactgcaacccctgactccctggttcaagcgattctcctgcctcagcctcctgagtagctgggatgacaggcgcgcccaccacacctggctaatttttttgtatttttagtagaaacggggtttcaccatgttggccaggatggtctcgatctcctgaactcgtgatccacctgcctcggcctcccaaagtaatgggattacaggcgtgagccaccgcacccggcctattttctggatttttttttttttttttttttgagacggagtctcactctgtcgcccaggctggagtgcagtggcgccatctcggctcactgcaagctccgcctcccgggttcaagccattctcctgcttcagcctccgtgagccactgtacccggccattttgtggaatttttatacaggaccccatacttcagatggcagaacacagtggagatgtgtggcaaatatatggactaatggagttccttgaagaatttgttccctgattcttcatggccttctgccctaagattctgatgttccagaataagtattcctgctagtgacctcttatattttctactaatcactgtggttagaaacacaaagacttggccgggctcagtggctcatgcctgtaatcccagcactttgggaggctgaggcgggcggagcacttgaggtcaggagttcgagaccagcctggccaacatggcaaaacctgagtgcctgtagtactagctactcaggaggctgaggcaggagaattgtttgagcccagcaggcagaggttgcagtgagccaagatcacgccactgcactccagcctggatgacagagtgagactctgtctcaaaacaaacaaacaaaaaaccccacaaagacttatgagatcatggagactacttacccacagtcagccaagcttcgccatcttctcaaacccatgcagaggcatttgaccttagctaaggggacaaaaagaagtggcaactttccagccttggcaacatggtacaaccctatctctataaaaaaatacaaaaattagccgggtgcagtggtgcatgcctatagccccagcaacttttgggggactgagaggggaggattacttggggccgaggaggtcaaggcttcagtgagctgtgttcacaccactgcactccagcctggatgacaaagtgagacactgtctccaaaaaaaaaaaaaagataacttcaacctcttctcaacagtgactgctacaatttgtcttgaatgaaacagagaaaatccttagtgtttctcatctagaaaaggcaaaaacattaagtctggggttcagccctttttgatgggacactccacatccagtgatccaagaatttcattgcaaagcaaggttgccttcttgaggtccctgaccactgctatatggggaagactagggggtcaccatcatgaagttcatgtactcaatgaaatggaattgacctattcattagaagacaaattcaaaaaagttgaaattttggcagctaatgtataaaatgaacatctattttttttttctctttgtgacatctagtacctcttcctttgatagttatactgttctcttttggcaagaggatacctttcgcttaccctcagtctatgtcctttttggataaggatgataccccctaaccttcctggaatggccatatgacctgcacctgccgaatcagagcagtccaggcctctgggccttgtgattatttcggagacgggcatgtgacgcaagctatgccagggaaatccaatcctggaactcttcctgaaaccctaaaggagaaagacattgtctctttccactgtggaggttgaactggtcaactgtaggcctggagttgcccgtggctacatgcgagatttagcaataaggtggtgatctggggctgtctattttaagtaacttttttgcttactgggtgctacttttactcatattcttctaatttataaaaagaacaatattaacttttttagtttctcacaattttgaaaacctttatttaaaaacatctggggctgctaaggtaggtgccctggggaaaagccttaatcaccttgtcctaggtatggctctaaagatggaaaaacattcctctgcaccagtgttttttggtgcctatttataaatgtatgtggagtttgtccagatttcaacccaaccccattgtattcttcttcctgttctaaaggaccatgaactttttcagcttagtgagctggagtgacagaggcatggattctcccctaggcttttggtttcctaattttattcttttcctatttttgggagagtctctgcttttggctctcacctctggcaggccccactttctctgatgagcaacaagataaataatccagtctttgttatgctctgttacccagcttcatctcttacgcaggtttaaatcatcaggattgatcaaaactattcactttctttggactttgcataaacagattgaatcagacgtggcaaggtgcctgggaaaagccaccatcagttcctgctaacgactcacttcctctccctgcagtgtttcctatgactgcttcatttggtaggcacggtggaagctccttttctccctagtaaggtcccagccctgaacttacttggtcagcaggaaggagtagctgagagtttcttggcaagtgtgtcacctgcaaaggttcctctgccactgaccctaatctgccactctgcctctcctcttagttaacatgctcccctgctccagcaatgccagacaacttgcgtttcgctgaaggcaccaggctttcacttgctgtggtgtcttggcttcttctaggaatatcctttctcccttctttgccatatacgcctatttttcttgtaagatttctgggttagaggcccctcccctgtgctcgtctggctcctggtattgtcttccttgtggcagaattgtcatattattttgtcactttctgttcatttatctgtgaccccccacccctgccactatactgtgaattgctcttttatttatctgtaggtcccaaatacttgatacgtaataacagacaatgtaagcataggtgcaactgtatgcctggaactgtgcattcattatcacatttattcctcataaaaacctatgaaacgggtactgttattacctccattttacaactgaagagactgaagctctgagaagttaagcagttttccttggatgtcacagctagtaaatggtggagatgggatttgaaactctaaagcgcatactcttaaccacccttctaaacttcccctcaaactgaatgaactcttagggtctatccatgtcacaaagttgtgaagatgaaatgatatgatgaatgagaaatagcttcgtcagctgaaaacttatgtcaaaaactgctaatttcccttgaatatctgtcctctactcccctttcgtgatatttgttgatatttaaatgggcgcacagttgcctgtaataataaatgtcctggtatctctcgcaatcaggagtggccacaattctgtttgggtcaatggggtgtgaatagaaccatgctcacaacttctgggatatgcctttaaagggaaagtgtgagcctccccctttttttctgtcttttcagctagactatgaacatggtagtgatgagtcatcttggatcttacggataagatagaaggagcctgggaactttggcactgtgggactcacatacttgccctagactgcttatgcctagttgagtatagtagagagaaacaagcttctatcttattttagccactgctattttggatctctgctatagcagctgaacctacattctcacttatacagtctattcacaagtggaaggattattcttattattcctgtggagcagccttgagactgcttacagactatattacaaaaattaactttcctgtctcagtaaaagacattaacattcaactagtttgttcaggtcaaaaagctgggagtctttttgaaaaaacagttttattgaggcatacctgacatacagtaaactgaatatattaaagtgtacaatttaataatgtcccacccaggaaaccatctctgccatcaagataataaatgcattcgtcaccataaaagttacctcattctcttttgtaattgcttccttctttctgcttcccagtccctgatcccattgcttgctcctatcaggcaaccactaatcttttcttttcttttcttttcttttcttttgagacagggtcttgctctgtcactcaggctggagtgcagtggcatgatcacggctcatggcagcctcaacctcttaggctcaggtgatcctgctgccttggcctctgaagtagcttgccccacagttatgcaccattacacttggctaatttttgtatttccactgattttttatctgtttggatttgtttgcatttcctataacctgtagtatgttactatagtatgttactctattttgtctggtctattttgctcggcatacttttttggaaattggaagtcatctttgatgcctttctttctttcattgctcctctcaacacatacccatcccttcatcaagttcagtaatcttgacctgaatccatctacttctccctgtctccactgctatcatcctcatccagactaccactgtctctctcttggactactgcagtagtctcctaactggtcctcctccttccactcttgctctccccaatccattctcacctagaacccacaatgttccctttcaaatgggatcatatcattctcctgcttgaaatcactccggtggcttccaatcacactcagaataacattccaatgctgactgtagcttacaaggcctttcacggtttggcccctggttcacctctccaatgtcatcttctaccattcttcctactaattcatgctggcttcttcgttttcattcttcagatatgtgaagtctgtgaccaccttaaaccctttgctcttgctatttattctttttgtctggaatgttctttcccaagctctttgcatgtttggttcattttcattcattttttaggtctcatctcaaatgttatggccacccagagaacttcacacacctaaatggtctccacccagtcagtctctaaccatgttgctgttttcttccttaataatacttactgatatctgctcttattttgtatgtttattgttcaccttaccctccatggaatggatgctccatgaggtcagggagtttgtctgttattattgctatatctcaagggcctagaacagtgcctagcagatatttgataaatctttgttgactgaatacaaaaatatattgagcattattaagtagatctgagggataatgggagatcactattttagagtccacaaccgtggactggctgagcttcaggagtacatccttgtaatagtgaagacttgagtgtgaagtttgtttttttctatcacaataataaagcaagcacatcatgtttatttttggggcaagtatccaaggactgcaagcccttcagagctttcaaacacagtctcttcctgtcattttatttttatttatttttttttaaattttggagacagagtcttgctctgttgcccaagttagagtatagtggtgcaatcatagctcaatgtaaccttgaactcctgggctcaagtgattttcatacctcagctttttgagtagctaggtgcataccaccatgcctggctaatatttcattttattttatttttgagatggagtctcactctgtcgcccaggctaaagtgcagtggtgcaatctcggctcactgcaaactccacctcccgggttcaagtgattctcctgcctcagcctcctgagtagctgggattacaggcgtgcaccaccatgcccagctaatttttgtatttttagtacagacgggatttcaccatgttagtcaggctggtctcgaactcctgaccttgtgatccacctgccttggcctcccaaagtgctgggattacaggcatgagccaacgcgcctggccaattttctatttttatttctgtagagatgtgttctcactatgtagtgagctatgattgatcacaacactgcactccaagctggacaacagagcaacaccccgtgtctttaaaaataggattatggttactgaaataaaatactaatggatgctttaaatggtaaacgagacatagttgaaaagaaaattagtaagttggtggagagtgttgtagaaacctaaggtttagcacagggaaatagtaagtgtaaaatagaggttgagagatgtggatacttccacatacttctaatgagagttctacaaggagaaatgagagccaatgttgcatgagatactggttgaacattttctagaactgacataaatccttagattaaagaagcatactatggtccaggcatggtggctaatgcctataatcccagcactttgggaagatgaggcaggtggattgcttgaagccaggagttcgagaccagctgggcaacagagtgagacacccccctccatctctattataaaaattaaaaagaaaaaaagaaaaaagaagaagcatactatgtaccaagtaagaaagatttttagaatatacattttaagataaaggtttaggtgaatttttaggtatatatttttaatctacaaacacacacacaaacacaaacacacacatcaaagtagaagggcaaaacccaaagacaaagtgaatcttaaaatataccagagaaaagacagatttctaacaaagaaatgaaaagcagcctgacagaggactttttatcagtatataaaatcagaaaactatggaaaaatgccttcaataataattgtcaacctatagttctatatatagctaagctgtcattcaaaaataagggtgaaccttttagatatgcatttatttatttaaaaaaatatacatattttttggccaggcgtggtggctcacgcctgtaatcccagcactttgggaggccgaggcaggcggatcacgaggtcaggagattgagaccatcttggctaacacggtgaaaccccgtctctactaaaaatacaaaaaattagctgggcacggtggcgggcgcctgtagtcccagctacttgggaggctgaggcaggagaatggcatgaacccgggaggtggagcttgcagtgagccgagatagcaccactgcagtccagcctgggtgaaagagtgagactccgtctcaaaaaaaaaaaaaacaaaaaacattttttttgagacagggtgttgctctgtcaccctggctagagtgcagtggcagatcatagctcactgcaaccttgaactcctgggctcaagctattctctgcctcagcctctcaagtagctgggactacagaggtgtgccacacctggataatttttaaaaatttttgtagcaatggggtcttactatgttgtccaggctggtcttgttcaactcctggcctcaagcaatgcttctgccttggcctcctaaagtgctgggattccaggcatgagccaccacacctggcctgatgtacatttttagatatacacagagcattttctagggctgccacaacaaagtaccacaaactgggtggcttaaaacaacacaaatttattgtctcagttctgggggctagaagtccaaaatcaaggtgttggcaaagccatgttttatctgaaacccgaaagagaagaatccttcttgccttttccagtttctgatagccccagatggtttttttgagacagagttttgctcttgttgcccaggctggagtgcaatggcacaatctcggctcactgcaacctccaccgcccaggttcaagcaattctcctgcctcagcctcctgggtagctgggattacaggcatgcaccactacgccccgctaattttgtatttttggtagagacggggcttctccatgttggtcaggctggtcttgaactcccgacctcaggtgatctgcctgccttggcctcccaaagtgctgggattacaggcgtgagccaccacgcctggcctgatagccccaggtttgatgtggctttctccttatgtctgttcacatagtcctccttgtgtgtgtgtctgtatgtgtccaaagttcccctttttataaagacatcagtcatattgcattagggcccactctaataacctcatttaacttgattacctctgtaaaaactccatttccttccttccttccttccttcctttctccctttctttttattttttgagacatggctttgctctgtcacccaggtgggagtgcagtggtagatcatagcttactggagcctcaatttcctgggctcaagcaatgcacctattgcagcctcccaagtaactgggaatatagataactgccaccacactcggttaattttttttattttttgtagagatgaggtctcgccctattgtccaggctggtctcaaactcatgggctcaaagaatcctcccgcctcagtctcccaaactgctaggattataggtatgagccaccacgcctgtcccaaaaccctactttcaaatagggtcacattctgaggtactgggagttaggacttcaacatatcttttgtggggggcacaattcaacctgtaaaacaaagatgaagagaatttacttatcagacattcttactaaaagaacctactgaaggatttcctttatcatgaaggaaattaggctgggtgcagtggctcatgcctgtaatcccagcactttgagaggctgaggcaggtggatcacctggggtcaggagttcaagaccagcctggccaacatggtgaaaccccatctttacaagaaatacgaaaagtagccaggtggtgacatgcacctgtaatccaagctactagggaggctgaggcaggagaattgctggaacccgggaggtggaggctgaagtgagctgagattgaaccactgcactctagcctgggtgacagaatgagaccatgtctcaaaaaagaaaaaaaaaaaaaaaggaaattaaactcatgaggaagaagtagtatacaaatacacaaagagaaacaatgaccaaacaaacaatgcagagaagactcttgcctaagatcatattacccttaagtagtataatcagtatttgtacccaggttgtctgacagcttagcccaggctcttaacttttacagtccatacatctctatgaggactctttcaaaagtctcatgaggtaatgtacaggacagtatttcagactttttttgaatttcaatattcaatcactattttattttattttattttattttattttttgagacaaggtctcactctgtctttcaggctggagtgcaatgacacaattgatccccactcactgcagccttggcctccaggcctcacacaattctcctgcctcagcctcctgagtagctgggactacaggggcatgccaccatgcctggctaatcagtcagtatttattgatcatctgtaatgagaatctaagaaggtcccagagaatcaaaatatcagatcctttttactctttctcaaattggggaggaatgagtcttcttttttttttccagaataatttattcacatccagtatccattttgtatttttttcccgtgatgcactgtgacaggtgttctaggtacaagaggtggaagaaccattattccatagttcttgatttcaaggagcttacagtctaagaaaaatgttttctaaaaaaaggtagacagtgttatatgccttgagagagaaatagatgttgtgaggggagttcagaggagagattatctttgctctgtgtgatgggggatgtagtgcccatttgctggactttgaaagacaaacaggacggcgattaacaccagtgatttattgagtatctacttgtgtgcatggagctatgtttggagctttttatcctgatctcatttatttctcacaataaccctgttaggtcaatatggtcactctcaaacatgagaagactgaagctcattaaaaataggtggcagatgctggacgtggtggcttgcctgtaatcccagccctttgggaggccgaggcaggcggatcacttgaggctgggagttggagaccagcctgggcaacacggtgaaacccgtctctaccaaaactacaaaaattagccgggcgtggtggcaggcgcctgtaatcccagctactcgggaggctgaggcaggagaatcacttgatcctgggaggcagaggttgcagtgagccgagatcgtgccactgcattccagcctgggtgacagagcgagaccctggctcaaaaaaaaaaaaaaaaaaaaaatgtggccgggtgcggtggctcaagcctttaatatcaaagcactacagcactttgggcgaccaaggcgagcggattgtttgagctcaggagtttgagaccagcttgggcaacaaggtgaaaacccgtctgtacaaaaatataaaaattagctgagtgtgggtggcgcgcgcctgtagtcccagcgctactcacgaggctgaggtgggaggatcgcttgagcgcgggaggtagaggctggagtgagtcgtgattgcaccattgcactcgagcctgggtgacagagcaagatcctgtctcaagaaacaaacaaacgtacaaaaaaaaaaaaaaaccccacaaaatatccaagtgacttgcttaaagtcacacaattagtaaatggaaccagacataggctaaaggcagaccaagccttgaatctagattaggctggttccaaattccctgccctttcatctccctaacagtttgttttctttctctctttctttctttttttaaaaaataaaataaatttcctaattatttatgtagcactttctcttagcataacagtttttagagtaggttaacttttttttccatttccaaaagtcaattattatctattctggttcaaatgccaggtccttttatggcagagattctcaaaaaagtgatccgcggaggagttgcaccattaggtcactggggtagtctgcaaaagtgcaaatttccagaccccattctcaaagattctgagtacgtttgagatgagacccagagaacctgcatttttttgtttttaaacaaacgtattcagcctctcttgagaaccactgtgcctagaatgtctttgggaagcttttggaagtaataagttcgttttggaaagaacactccagacaagctttccaatagtctttcccaaactgtcatgcctgaggttctggacttactcttactcatccctgagagcacagcgactagctgaaggactgatcgactgatgagggtttgacctcatctacatacatctcaatttagcagcacatattaagctagctggcaaactgcttaaagccacatgggaaatctgcgcgttgggctatgtctggaagatacggaggagcaagccagacctgaccggtcaggtagtgaagacacggaatccgaaacccaaatatttcaggagtcaattctcagagaaagataagaagcccggttagtccaactcatgcgcaggcgcagaagaaagaccggcgcacaaagtaagacgcgcccttccccaccctatttcagtccaactcccactgcgcaggcgcttacagtgcaccaagatggccgcccccgtggatctagagctgaagaaggtaaaagagggtctttggcaggcggaggtcttctttttggaggctgaggggactatagacaagaatatcaagtgaggcacgagccttgcagaaggaaggagggtccagtggactagggaatggtttcccagagtcctaaggcctcactgggtctccataaacggggtggggggcgagcggctcttgctgggtaggagccggttggtctgggtcgggtaagtctgcgggcctgtctcgggcttgtccagtctttctgagctccagagacatttcgttgcgtttggaggcttcagggactcactttcatagtaagaactaaagagagcatttcaaatgggggtcccttcggaccccttgcctgagctgtggcatccgtaattctgcctcatttgctttgaaaaactccaagtccaacctttgtttttaggccatttattcggttctgtaccttgaaagttgcaatatctacagttcggaaaaccaagcattgtagcagcaatgttcatttcaggattttgccccccctccacttcttttgaaggactcgtcaaacaaaacaaaacaaaacctccttcttttgaaggaattgtcaaaaacaaaacaaaaccagtaaagttttccaaataaaaccggtatcggaaggaattgggtttcctgttttcctcagttgcttataaatgtgttgttattcagatttttgctatctaagaatgatcagcattctaacaccactaatgaccccaaaccagtatgctttgtgcggtggggtggattggaaaggaccctagaatttatctattttaaatctacttttctggaaaaggaaccagtgccagaaaagtctgtcagaagttgggactagaatccagtattctctgccttatctcacacttttttgaccactattttgagttcttcagatgagcaacatcttagttaagactgcctgtggtcaacttgtgtaaaagaaataggacagccgaaatagctgttgcttctaacaaatgaagcttttgttagtgttgtgaggatattatgtgtttgtgtcttgcttttgttcttcttgtcttgaatcttgtaaatttagctcttaggtggagtctctaatctttaacagtatactagctcatctttaatggtatactagcttccttagcaagctgtatagagcagtcagatgatacctggaattttacatttcaaaacaaaattgtgcattctaaaaatttaccttttcttctgttaaaagtaccgatttaaatcagggtttagtgaatggatttgcctcctggtacttttgaatttattgctacatttgaaacttgcgggcggtgaatgcaaactaagaaaatgattacaaacttaaaatgaataattttgataaccaattaattaaaaaacttgtttaaaggttttatcttctaatgtttttacagggtcctttttttgggtggagacaaataggaaatttcaggcccctccccttccccaaagtaaatctttcaaaaccttactagtaggtgaaaacaaggtcacaataaaaattatgtagtagcctttgctg

SEQ ID NO: 716 - DNA, 582 bp, Homo sapiens
  misc_feature (523)..(523): n is a, c, g, or t
ggaagccataactatttaatttccaaataattgcttcataaagaatcccatactctcagtttgcacaaaagaacaaaaaatatatatgtctctttaaatttaaatcttcatttagatggtaattacatatccttatatttactttaaaaaatcggcttatttgtttattttataaaaaatttagcaaagaaatattaatatagtgctgcatagtttggccaagcatactcatcatttctttgttcagctccacatttcctgtgaaactaacatcttattgagatttgaaactggtggtagtttcccaggaaggcacaggtggagttatttgtgagaagcaaagtgtttactaatgacaaagtagtaaaccattttcaagatgaaaactgatttctatttattttgcttcaaaggtcctgaaaaaataagcaattatcataacaatttgttattgatactggaggtttcattgacatgtctctccaattaaagctcacactgcctccataaaagcttcacatcnaatttataagctttcaagtattatttataaggcttggcagaatattggagtttaaataa

SEQ ID NO: 717 - DNA, 1354 bp, Homo sapiens
ggggaattcgggaaaatttgagaaggaggctgctgagatgggaaagggctccttcaagtatgcctgggtctgggataaactgaaagctgagcgtgaacgtggtatcaccattgatatctccttgtggaaatttgagaccagcaagtactatgtgactatcattgatgccccaggacacagagactttatcaaaaacatgattacagggacatctcaggctgactgtgctgtcctgattgttgctgctggtgttggtgaatttgaagctggtatctccaagaatgggcagacccgagagcatgcccttctggcttacacactgggtgtgaaacaactaattgtcggtgttaacaaaagccattccactgagccaccctacagccagaagagatatgaggaaattgttaaggaagtcagaacttacattaagaaaattggctacaaccccgacacagtagcatttgtgccaatttctggttggaatggtgacaacatgctggagccaagtgctaacatgccttggttcaagggatggaaagtcacccgtaaggatggcaatgccagtggaaccacgctgcttgaggctctggactgcatcctaccaccacatagtccaactgacaagcccttgcgcctgcctctccaggatgtctacaaaattggtggtattggtactgttcctgttggccgagtggagactggtgttctcaaacccggtatggtggtcacctttgctccagtcaacgttacaacggaagtaaaatctgtcgaaatgcaccatgaagctttgagtgaagctcttcctggggacaatgtgggcttcaatgtcaagaatgtgtctgtcaaggatgttcgtcgtggcaacgttgctggtgacagcaaaaatgacccaccaatggaagcagctggcttcactgctcaggtgattatcctgaaccatccaggccaaataagcgccggctatgcccctgtattggattgccacacggctcacattgcatgcaagtttgctgagctgaaggaaaagattgatcgccgttcgtgtaaaaagctggaagatggccctaaattcttgaagtctggtgatgctgccattgttgatatggttcctggcaagcccatgtgtgttgagagcttctcagactatccacctttgggtcgctttgctgttcgtgatatgagacagacagttgcggtgggtgtcatcaaagcagtggacaagaaggctgctggagctggcaaggtcaccaagtctgcccagaaagctcagaaggctaaatgaatattatccctaatacctgccacccaactcttaatcagggtggaagaacggtctcagaactgtgggaattcc

SEQ ID NO: 718 - DNA, 4007 bp, Homo sapiens
  misc_feature (225)..(225): n is a, c, g, or t
gctctaggctccaaagtacctgggtattgtcccttcatcaagaaagccccacagctctggagggctctgataatcccgttgtcagctctctgaaaagacagcatggctattaccctacagcccagtgacctgatctttgagttcgcaagcaacgggatggatgatgatatccaccagctggaagacccctctgtgttcccagctgtgatcgtggagcaggtaccntaccctgatttactgcatctgtactcgggactggagttggacgacgttcacaatggcatcataacagacgggaccttgtgcatgacgcaggatcagatcctggaaggcagttttttgctgacagatgacaatgaggccacctcgcacaccatgtcaaccgcggaagtcttgctcaatatggagtctcccagcgatatcctggatgagaagcagatcttcagtacctccgaaatgcttccagactcggaccctgcaccagctgtcactctgcccaactacctgtttcctgcctctgagcccgatgccctgaacagggcgggtgacactagtgaccaggaggggcattctctggaggagaaggcctccagagaggaaagtgccaagaagactgggaaatcaaagaagagaatccggaagaccaagggcaaccgaagtacctcacctgtcactgaccccagcatccccattaggaagaaatcaaaggatggcaaaggcagcaccatctatctgtgggagttcctcctggctcttctgcaagacagaaacacctgtcccaagtacatcaagtggacccagcgagagaaaggcatcttcaaactggtggactccaaagctgtgtccaagctgtgggggaagcagaaaaacaagcctgacatgaactatgagacaatggggcgggcactaagatactactaccaaagaggcatactggccaaagtggaagggcagaggctggtgtaccagtttaaggagattgccaaggacctggtggtcattgaagatgaggatgagagcagcgaggccacagcagccccacctcaggcctccacggcctctgtggcctctgccagtaccacccggcgaaccagctccaggggtctcatccagatctgccccccagggcaagggcagctcttcttgggagaagccaaaaattcagcatgtcggtctccagccatctgcgagtctggaattgggaccgtcgctaggcaaggagatccccactacctccaccatgctcgtctctccagcagagggccaggtcaagctcaccaaagctgtgagtgcatcttcagtgcccagcaacatccacctaggagtggcccccgtgggtcgggctcggccctgaccctgcagacgatcccactgaccacggtgctgaccaatgggcctcctgccagtactactgctcccactcagctcgttctccagagtgttccagcggcctctactttcaaggacaccttcactttgcaggcctctttccccctgaacgccagtttccaagacagccaggtggcagccccaggggctccactgattctcagtggcctcccccaacttctggctggggccaaccgtccgaccaacctggcgccacccacggtcacaggggctggaccagcagggcccagctctcagccccctgggactgttattgctgccttcatcaggacttctggcactacagcagcccctagggtcaaggaggggccactgaggtcctcctcctatgttcagggtatggtgacgggggcccccatggaggggctgctggttcctgaagagaccctgagggagctcctgagagatcaggctcatcttcagccacttccaacccaggtggtttccaggggttcccacaatccgagccttctgggcaaccagactttgtctcctcccagccgccccactgttgggctgaccccagtggctgaacttgagctctcctcaggctcagggtccctgctgatggctgagcctagtgtgaccacatctgggagccttctgacaagatcccccaccccagcccctttctccccattcaaccctacttccctcattaagatggagccccatgacatataagcaaaggggtcagggcaagtgtgacccaccaggcaaaattgagcagcattttcatagggaccgacttcagtagcacacctgcccctgcatttcagtgggatgtcaatacacttgaccccaagtcccccggccctgcctggtgtcactgtggccaaacagtgcccagcttaagcatccctggcatcagactatggccttcaagagcactagggcatatgcttttggcagcataacgggctgacttggtgatggagggaaaaagccttgagccaggcagaagtttgtggccagggtttgtgcagcagctttgtgagaagagcccttctacctggctctatctcactggctgcattccctacacagggaatttactaccctatatgtgaatatccctgtatgtacttgtgtgtacttgttggtctgtatcttagtttctttggggaggacagggctgtagctgtgaggtcttgtctccaagggtgtgtgtatgtctccgtggatcagccacagggatagggattttgtttttaagggaaagcattctctaattccctttgttcatgccgagattcagttgctctgagactatggggtacaagtttgatcctccgaatctggagatgttgtagagctggaacgagtgcagagtaggaacgctttgatgcgcatgcacattggggaagatgcgctcctcagggacacaaaggccgagtggggtaaaaccacgaagggagggaagggaagtcagctctgggagcagccctcactggctggaccaaggtactcttcctggagtttgccgtgttagcaacmacagtcaccttgcagtcaggctggaatcttgggccaccccaaagtgctttgctgaaggatttagacggggatgaagtgccctccagcctcagagctagccacaaagcccccagagctgaattcattgagtatttgtgcctagggcttgggctgtttgtgtgataccggccccccgccagacaatagcctttgtgacgccccagcctacttccccgatcctgggctccctcttgatcactttttgacattttccagctgtcaggcatcactgcggctagtccggcagcgacctagatggggtccacccccattcctgctcaagcatgggcacctaccacatggtttctgctgctcagcctgcctgcaactcacctcgaaggcggaccagcctgcctctgtgatgactgcagcagacctccttgggtgtaccaatgcccctcatctcccactttcacacctaaccctgactccttcaccaagaagacgggagtcggcagccaggagttcccgtggcacctctctctcttcgtggctccctgcttcccccttccctctttccgaggaagggtcaacctattctctctcaaagccaacccctaggccaattgcctggatctcctcccctctcccttctttaaacgagcttgcctccctcctgccaagtttgagggcaaggctaagaaatgtcagccacggaaacaactctattatctggtgactttgggtaatgtgaatcagtgcctgaggacctttgctgtggccttggtacagaaccatccacttgacctaactacctcccctggccgcgctctcgctcttctcttctttgttaagccaacaactatcaccctctcctactcttcttctccctgccccctggagggcactgtgtttggttgtgcaaatgtatttactatgcgtgtttccagcagttggcattaaagtgcctttttctaataaaatcagtttattagcaaaaaaaaaaaaaaaaaaaaaaaaaaaaagcagccgctgaattctagacctgcccgggcggccgctcgagccctatagtgagtaatcgaattcctgcagcccgggggatccactagttctagacg

SEQ ID NO: 719 - DNA, 318 bp, Homo sapiens
tccagtctttcttgctgcacgggcgtggggagttcggaagggcagagaagcccgttaatgcattgcttctttccctcttaggcgcctgggggcccggggcccaggccaaagccgcctgccccagcccccgactgcatcaaccagatagcggcagcgttcggccacatgcccttgctgtcctctcgtctgcgtctggacccggtgctgtttaaggacccggtgtccgtgcagcgcaagaagtaccgcagcctggagaagccctaggggggcgacccgcggagaccccagcagaggtcgcagcccagctcccagggggcc

SEQ ID NO: 720 - DNA, 2234 bp, Homo sapiens
gccgcgtgcagaggtgctcaagcctcctcgcggtccgcagtcagtgccgccgcgcccggcctcccgcacgccccgcaggtagcgcccccgcccgcggcccagagtgcgctcgcgccggcaccagctcccggataaacggcgcgccgcgcggagatgacagccgaggagatgaaggcgaccgagagcggggcgcagtcggcgccgctgcccatggagggagtggacatcagccccaaacaggacgaaggcgtgctgaaggtcatcaagagagagggcacaggtacagagatgcccatgattggggaccgagtctttgtccactacactggctggctattagatggcacaaagtttgactccagtctggatcgcaaggacaaattctcctttgacctgggaaaaggggaggtcatcaaggcttgggacattgccatagccaccatgaaggtgggggaggtgtgccacatcacctgcaaaccagaatatgcctacggttcagcaggcagtcctccaaagattccccccaatgccacgcttgtatttgaggtggagttgtttgagtttaagggagaagatctgacggaagaggaagatggcggaatcattcgcagaatacagactcgcggtgaaggctatgctaagcccaatgagggtgctatcgtggaggttgcactggaagggtactacaaggacaagctctttgaccagcgggagctccgctttgagattggcgagggggagaacctggatctgccttatggtctggagagggccattcagcgcatggagaaaggagaacattccatcgtgtacctcaagcccagctatgcttttggcagtgttgggaaggaaaagttccaaatcccaccaaatgctgagctgaaatatgaattacacctcaagagttttgaaaaggccaaggagtcttgggagatgaattcagaagagaagctggaacagagcaccatagtgaaagagcggggcactgtgtacttcaaggaaggtaaatacaagcaagctttactacagtataagaagatcgtgtcttggctggaatatgagtctagtttttccaatgaggaagcacagaaagcacaggcccttcgactggcctctcacctcaacctggccatgtgtcatctgaaactacaggccttctctgctgccattgaaagctgtaacaaggccctagaactggacagcaacaacgagaagggcctcttccgccggggagaggcccacctggccgtgaatgactttgaactggcacgggctgatttccagaaggtcctgcagctctaccccaacaacaaagccgccaagacccagctggctgtgtgccagcagcggatccgaaggcagcttgcccgggagaagaagctctatgccaatatgtttgagaggctggctgaggaggagaacaaggccaaggcagaggcttcctcaggagaccatcccactgacacagagatgaaggaggagcagaagagcaacacggcagggagccagtctcaggtggagacagaagcatagcccctctccaccagccctactcctgcggctgcctgccccccagtctccccactccaccctgttagttttgtaaaaactgaagaattttgagtgaattagacctttatttttctatctggttggatggtggctttaggggaagggggaaaggtgtaggctgggggattgaggtggggaatcattttagctggtgtcagcccctcttcccttcctccattgcacatgaacatatgtccatccatatatattcatcagaatgttaatttattttgctccctctgttaggtccattttctaagggtagaagaggcaagtggtagggatgaggtctgataagaacccagggtggagagggagactcctgggcagccgttttcctcatcctttccctctcccagtccatttccaaatgtggcctccatgtgggtgctagggacatgggaaaaaccactgctatgccatttcttctctctgttcccttcctcacccccgacggtgtggctgatgatgtcttctggtgtcatggtgaccaccccctgttccctgttctggtatttcccctgtcagtttcccctctcggccaggttgtgtcccaaaatcccctcagcctcttctctgcacgttgctgaaggtccaggcttgcctcaagttccatgcttgagcaataaagtggaaacaataaaaaaaaaaaaaaaaaaaaa

SEQ ID NO: 721 - DNA, 4210 bp, Homo sapiens
gagcccgggagccggaggtgtagcggcagagacattgttcttgccggctccctacggtgccgtgtgtgcgtgagagaagaccagtctttcctctagcatttgacattgtgcagcaaagaaatggttatggagaagcccagtccgctgcttgtagggcgggagtttgtgaggcaatattatactttgctgaataaagctccggaatatttacacaggttttatggcaggaattcttcctatgttcatggtggagtagatgctagtggaaagccccaggaagctgtttatggccaaaatgatatacaccacaaagtattatctctgaacttcagtgaatgtcatactaaaattcgtcatgtggatgctcatgcaaccttgagtgatggagtagttgtccaggtcatgggtttgctgtctaacagtggacaaccagaaagaaagtttatgcaaacctttgttctggctcctgaaggatctgttccaaataaattttatgttcacaatgatatgtttcgttatgaagatgaagtgtttggtgattctgagcctgaacttgatgaagaatcagaagatgaagtagaagaggaacaagaagaaagacaaccatctcctgaacctgtgcaagaaaatgctaacagtggttactatgaagctcaccctgtgactaatggcatagaggagcctttggaagaatcctctcatgaacctgaacctgagccagaatctgaaacaaagactgaagagctgaaaccacaagtggaggagaagaacttagaagaactagaggagaaatctactactcctcctccggcagaacctgtttctctgccacaagaaccaccaaaggctttctcctgggcttcagtgaccagtaaaaacctgcctcctagtggtactgtttcttcctctggaattccaccccatgttaaagcaccagtctcacagccaagagtcgaagctaaaccagaagttcaatctcagccacctcgtgtgcgtgaacaacgacctagagaacgacctggttttcctcctagaggaccaagaccaggcagaggagatatggaacagaatgactctgacaaccgtagaataattcgctatccagatagtcatcaactttttgttggtaacttgccacatgatattgatgaaaatgagctaaaggaattcttcatgagttttggaaacgttgtggaacttcgcatcaataccaagggtgttgggggaaagcttccaaattttggttttgtggtttttgatgactctgaaccagttcagagaatcttaattgcaaaaccgattatgtttcgaggggaagtacgtttaaatgtggaagagaaaaaaacaagagctgcaagagagcgagaaaccagaggtggtggtgatgatcgcagggatattaggcgcaatgatcgaggtcccggtggtccacgtggaattgtgggtggtggaatgatgcgtgatcgtgatggaagaggacctcctccaaggggtggcatggcacagaaacttggctctggaagaggaaccgggcaaatggagggccgcttcacaggacagcgtcgctgaagctccactgttggcaaagtcttggcagtggtacattattcatcgtgtttgcattcttgttaattttttttttggctttggaatgtgacacagcctttttgatcatttctttgatgtgaaaagcatctttggttatcagttaaattgaggtggacattatttccccaatttcacaacaggattcacattgttaatttataaatctagacttggagaattaaggactgagaaatgaccatatcttaaactatctacgacaaagtgaacttaaaaggacatgcccactgaattcaggtcctttgagtaaaaaaaaaatcttctgctgcacattttgtttaagtgttactgtttctgcctgttaatgctgggaacacaaatagtgcaatttgtgcaattggagaatcttgccttttttcttggctccccccaaaaatacaaaccaacagaaacttgttatgcactcatcaaaatgtactaatgggtactctgaactcattaacattgacatctgcaacaggaggcaacagggaaaaaatctcatcttcttttccagtagaaaatagtttgtgaaatgatgagggcattttatctgcttgctgtgaccagcgtgtgtacacataaaccttaacaagactacaagtatattccagaaggaaatcattttagttatgaactaaataataaaaattagaacttcaaatgcgatggtcttgactattagaccagatttagtagctccatatctaagatttttctacctgcccctcttcagtacagggatggctggctgctcaacacactcctcctccccttttttcctttctttaagctgtgtacagtgaaaattgtctttactgtatttttgttctctggtaatgtaataagcatgatggtgccttctattaatacatcattccagtcttgctggtaattttgtacagtatagtgtatgaattgctgtgctgcaaagccaaacagctgcaaaatgttgaaaaatcatcgaaatgtataaaaattgcagtatctttaaaatcagtaaaatggactagcatattatttatcttgttcttcagttaacaactttgtgttctctgtgggagggagggagtcctgtgtgtttgtggggagagggaaggaggaagtcagttatttgagtaagcctctagttgacttttctcttagcctgaatgtggacgttgaaacatatcacttcagggcttggaaaagtcagtcaacttgacgtacatttttagtgacattttaaaagcagtcagattctataaatggcaagtaagcctgaagtgaggatactgcaattttcggagaaaagaacagcagctctttaagtgtttgcattttctatttggggggcagggaactgtcattcattttgcacaattcttgaactgatgtcagcacccgagtggctcctgaatttaagtctgggacgacatcttttatttttacatgaatctttaaacaattctgtgagcaaagtttgtagctgctggattattgtctgtctttatagcaagttccagtaaaccacaagtatggcaaagcttatccaattttatgcttggagcagtcagtacataccagtttctgatgtttcaggcaggagtggggtaaataagtgtgaccacttaaagctgctcgttagcatggaagacttctccattctatctttgtaaaacagacaagatatgcacttgacatagtagcaaattggttctgaattatgcaactgtttgctatttagtaaactagcaaatgatgcatgtattttgtttttcatgtactgggcaatatgagtaaaatctgtccctttttccccctttgaatgaggtcttccatgtttgagggaaagtcttgcactattgcatatattttggggacacagattttcatagtttccatttttggggggcttaaggattttttttttttctgtttgaaacagttttatactttctgatatagtacttgaaattcttaccagaaaattactttggagttttgaagcctttattaatactacttttaaagaagcagttgttttattgtcaatgttttttttcccccaagcatattttcttgtatttctgtttccatatatatatatatatataatttccaattcaggatattgccctgccatccatgaaaactgttctggcaccaaaagtaatgacaaatgttaagtgtaataatagaaaagtagagcaaagagccattcagcttcagtctttacataccatgaataaaacattaaaacatcatatggagaagtttacatggtgattgttcacctgcagtactgtggagttttaacattttgtcctcttttcagtgaaacagagtaaaaatattcatctaccattactgttatttgctgattttgttttattttttgatggtaatattctatccttatgacactattgcaaccaaattggctttaccatcttggctttagtaggtatagaagacaatggattaccatctttattgctgtaatgtgttaagcattatatgctagtagaatctagtttaattgtttcaggtggaaagtattctttgagtttccatattgaatgtgtttggactaaacaaacaataaactactgatgtctgcagc

SEQ ID NO: 722 - DNA, 2784 bp, Homo sapiens
aaacaaattgcgaaaagatgctagttctcaagactgctatgatattccacgagcatttccaagtgatagatctagttcacttgaaggcttccataaccactttaaagtcaaaaatgtgttgacagtgggaagtgtttcaagtgaagaactggatgaaaattacgtcccaatgaatcccaattcaccaccacgacaacattccagcagttttacagaaccaattcaggaagcaaattatgtgccaatgactccaggaacatttgatttttcctcatttggaatgcaagttcctcctcctgctcatatgggcttcaggtccagcccaaaaacccctcccagaaggccagttcctgttgcagactgtgaaccaccccccgtggataggaacctcaagccagacagaaaaggtcaaagtcctaaaattttaagactcaaaccccatggtttagagcgaactgattcacaaaccataggtgactttgctacaagaagaaaggtcaagccagcgcctttagaaataaaacctttgccagaatgggaagaattacaagccccagttagatctcccatcactaggagttttgctcgagactcttccaggtttcccatgtccccccgaccagattcagtgcatagcacaacttcaagcagtgactcacacgacagtgaagagaattatgttcccatgaacccaaacctgtccagtgaagacccaaatctctttggcagtaacagtcttgatggaggaagcagccctatgatcaagcccaaaggagacaaacaggtggaatacttagatctcgacttagattctgggaaatccacaccaccacgtaagcaaaagagcagtagctcaggcagcagtgtagcagatgagagagtggattatgttgttgttgaccaacagaagaccttggctctaaagagtacccgggaagcctggacagatgggagacagtccacagaatcagaaacgccagcgaagagtgtgaaatgaaaatattgccttgccatttctgaacaaaagaaaactgaattgtaaagataaatcccttttgaagaatgacttgacacttccactctaggtagatcctcaaatgagtagagttgaagtcaaaggacctttctgacataatcaagcaatttagacttaagtggtgctttgtggtatctgaacaattcataacatgtaaataatgtgggaaaatagtattgtttagctcccagagaaacatttgttccacagttaacacactcgtagtattactgtatttatgcactttttcatctaaaacattgttctgggttttcccaatgtaccttaccataattcctttgggagttcttgttttttgtcacactactttatataacaatactaagtcaactaagctacttttagatttggaaattgctgtttacagtctaacaacattaaaatgagaggtagattcacaagttagctttctacctgaagcttcaggtgataaccattagcttatacttggactcatcatttgttgccttccaaaatgctgaggataatgtatgtactggtgtcaggacctagttctctggttaatgtacatttagtttttaatggtggaactttgttatattttgttaattacagtgtttttggttcattgagtgaagattctgccgggtgggatcttgcacctttgaaagactgaataattacactaccaagtaagcctgcaaatcattgatggcatgcagtgatgatgtgctcttacacttgttaacatgtattaagtgttatttgcaaaaggtagattatgtaaccaatcaggtacgtaccaggcagtgatgtgctaatacactgatcaggtttagacaatgagctttggttgtgttcttgttagtcctaatattggttttcagtttggaattaataaagcagttgacattcactgttagttacagcaacatactgtgatttttaattagatagtaattcagatttattactctatgaaattctgtcttttgacaccatagtgccctttctatgattttttttacttaatattcttcttggccttatatttaattccctatgcaattaatattttatatctgcattttttttaaaaaaatagatgttatataagtgattctcgtatgtagcacctgttgcttttccactgaaagaattacggattttgtactgtgatttatattcactgccccaattcaagaaatattggagccttgctacaatgtgaaatgttatagtcatggactccttccaaccagatttctgaaaacaccagagggatggtataattctgtctcacctataacatggtcctgtgacatagatattaagaccacaagttgtagtgaggctacaattatattcgtctgtcttggctttgcaacataatttagaaagcacgtatagttgttttttaaccaagttacatacaatctcatgtactgatttgagacttataacaatttttggagggggcatagagaaaggagtgcccacagttgaggcatgaccccctccattcagacctctaactgttgcctgagtacacagatgtgccctgatttctggcccattggccatagtactgtgcctaatcaatgtaataggtttattttcccaatcctcaaactaaaaatgttcataacaagatgaattgtagactagtaacatttgatgcttttaaatatttgcttctttttaaacaaaaactaaaacccagaagtgaatttttaggtggatttttaaataaaaaagattgattg

SEQ ID NO: 723 - DNA, 100998 bp, Homo sapiens
gatcacttgaggtcaggaatttgagacgagcctggccaacatggcgaaaccccgtctctactaaaaatacaaaaattagccaggcatggtagtgcacgcctgtaatcccagctactcgggaggctgagtgaggcaggagaattgcttgaacccaggaggcagaggttgcagcgagtcaagattgtgccactgcactccagcctgggggacagagcgagactccattgaaatggactccattgaaaatttttttttttgaaacaaaaaaaaaaaaaaaaaaagggtcatgtcagttggacctggcattggccctgagaggaaccaggatgcccgtgtaaggggcgtgtgggcatcacctgagatcagcgatggtgacaaagacctcctggcgcatggaactggacagagaatgcgggcgttcctcttgtaccagtacctgcaatgagagggaaagaacttgagagttgagaaagtacccattcattaggccagtgacgatcagagactgggtggccagcaagaaccacaaaaggtccttcagccagccctgctcttaggccccagatgcctggcagcaggacagtgacagggataggggtttattctcttgagccagaccccagaccctggctctgcctcttaccaggtgtttgagctgacacaaattatttaacctccttgtgcctcagttcctcatctgtaaaaccagaaaacaggaatacttaccttcatggggcggctatgagtactcactgagcaaattcatgacacccagcagccctgtgtaattgttagtgtctgttattcactctttttatcaccagtgattatttctagtttaggcattctaactcctctctccactaaaccagccatctctctatgatcacatctaatattattctgagttacttgtcccggaaaaagaataactttccaatttacaaactggcagagggaaagtgcattgctgtgctggaaaaacccgtggagtgataagcaggggctctggagtgggacagtccctgggctgcgcactggctctgccactcactcactgtgtgagcctgaatgtgtcatttaactccctgtgcctgagttgccttatctgtatggagaaaatgagctaatgtaaatgactgtagctggctggacgcagtggctcacgcctgtaatcctagcactttgggaggctgaggcgggtggatcacctcaggtcaggagttcgaaagccggcgcctataatcccagctactcaggaagctgaggtaggagaatcgctggaacccgggaggtggaggttccagtgagccaaggttgcaccactgcaccccagcctgggtgaaagagtgaaactctgtccccccaacaacaacaacaaaaaagactgtagcagaagccttgctggactgtccaccaggcccctctgggaactgtccccaacccacagaaatgggtacttcaaagctctgtgtctgctaggtcattctgtcccactggctacagctcatctgtcccagagtagacaccaaggtctattagattctctctggaatctggaattgggacacagagcttcaatctcagtctggatggtcttctaaaggaaaaaatttaaaatttggaagcactggtccctgtggatgaggcaactgagagggccaattttggggagagaagatgggggagagggagacggggtggggggaaagggagagagagaggagaaatggaaattcatacaaaggagcaaaaataagatatggaaagttctccttgagtatgtggaaggtttttattttctagattcattcccttcctgggtcaggctgctcctcctgtcaaggggttctgggaagcactcagtgatccttagaacaaatctcaccttttgtgtttcagctgcttctagaggatttctcttacctgcaaccaagaagatctcactaggaacttaggatgcaggctgggcgcagtggctcacgcctgtaatcctagcactttgggaggctgaggcgggtagatcacctgaggtcaggagttcgagaccagcctggccaacatggtgaaaccccatctctactaaaaatacaaaaattagccagacatgatggtgggcacctgtaatcctagctacttgggagggtgaggcaggagaatcgcttgaactcgggaggcggaggttgcagtgagccgagatggtgtcattgcactccagcctgggcaacaagagcaaaactccgtctcaaaaacaacaaaaaaacttaggatgcagtaagtgctcactaaacactacaaggttccctttcttgcccctttctgagtttttctcctcttactttccagctttggtctgactccgatcttgctggtgggctgctgctttcttccttattttctcaaggagcacatttattcttgcggctttatagtccagaagggacaaagcctaagactctatctttagccctgacagctctcccagggctctactcatctgcatctggttatctccagggcacaccactaacatccccagaattttggcattaaagtcagttcactgtggtccccgtgcgaagaacacagcttcctatcctttaatagctgtcaactgttccctttcccagggctcactaaaaaggtgattcatgattctttcttttgttcaagccctacctcctatcagttatagcatcagccaccccctgctctgcacggtttctgtgactctccattcctggagccatacgccttcatatggatgaaagcagggtctcttagctgaagccccgggcttgcaatcccctctgacttcaattgacttgatccacttctgccagaatcatcttttctttttttaatcagttgggtattgaaggtttattatttgttcacagttatgctggcctccacagggaattcaaaagtgagagggtattttttgttagtagagtatgtgtgtagcaggaactttctgggtgactgcccagatcacagcaatcaccctttctccctcggaacgcctccgaaacgcagggtgggacacccagaagtcatatcattactatatgatcttgcccccaggcaaacctgattgatgcaggggtggggaacagactagtttgggccaatcagattttctcttgcagaatttggaatcttacagtgacaggcacaaagcgggagttgctagagggttgagtcatggtgatggtagcgaagcccctgcctctgagagctctggagctgtcctgaaacttacttttctggaggcttgtttaaacctcatccttagagtctaagagagatatcccagcatcctttttttttttttttttttttttggtaacttacgtgagccagaggtgatttttgtttcttgcctgaagaatcctaactaatccaaacaaaattagacgttttgtctcaaaggtctttttttttttttttttttttttttttttttttttttttgtgagacagagtctggctctgtcgcccaggctggagtgcagtggtgtgatcttggctcactgcaacctctgcctcccaagttcaagcgattctcctgcctcagcctccggagtagctgggactacaggcgcctatcaccatgcctggctaatctttgtatttttagtagagacggggtttcaccatgttggcaaggctggtctcaaactcctgacatcaggtgatctgcccacctcagcctcccaaaatgctgggattacaggcatgagccactgtgcccagcctgtctcaaaggtcttaacaaaagccgagcagatgtgaatatctttattttactggtagagctactgatgttcagataagctaagtgatttgtccaaggtggggagggttttgtggaggacctcagatatagaattccgatggagtcccatggtggcagaggagaattaagaggcaaatctggttacattaaaattttattacagtaggtcttggtgctcatgtctgttgttgagtcactaaaaaccatctcctggccactctgccatattgcagaatgcagaaccctagccttggcatagccaagtagcattcttcagcttaccatctgaagtccttacccagtggtcctttctctcttctctcaatcctatccatcatatctttcaaagattaggtcagatccacctggattaatttcaccctaatcctgctgtcactttattctatatcccagttgccacagcctgcctcccttccctttccttccttcctctttttctttcttttcatttctcctcttctcttttctttcgttcttctttcctttgtctttcctttctttttctttctctctcctttctttttctttctctccttcctttcttctttttctttcctttctttctttctctcctttttttctttcctttttttctttctctccttcctttttttcttttttctttctctccttccttcctttctccttccttccttccctgcctccctcctctctccctccttcccttctcttccccttcccttccctccctcgctccctccctcccttcctcccttccttccttccttccttctttccttccctcactcctctttctccctttcccttccctcccctccctccctcctccttctcttcctctctctgtctccctctccctctctctctatttctttaaagatgggggtctcactatgttcctgaggctggagtgcagtagctattcgtaagtacaatcatagctcactacagcctccaacttctgggctcaagtgttcctcctgcctcagcctcgacagtggctgggactacaggcaggtgctaccacacccagcctcttttctttttcattaaagttctcaacattatataatgtatatttttatattatattgtatattgtatattttttacaatatacaataaactgtacatatttaaagcatacagtttgatgatttttgatatatgtatatatccatgaaaccatcaccatcctcaagagaatgaacatttctatcacttccaaaagtttctttgtgctactttgtgattcctcgctccttctcctcctcactcaacctctgcctctaggttaccattgctctgctgtcactatagattcattggcattttctcgaatttcatgtaaatagaatcacgcatgatatcctcttttttatctgggttctttcactcagcataactattttgagattgttccaagttgtagcatatttcaatagttccttttcattctcacgtagtattccatcatgtggatatacaataccacaatttctttatccgttcacctgctaatgaacacttgggcttcttctagggtttggcttttacatatagagctgctgtaaacatttgtgcatgcatcattgtgtggacatatgttttgttttacctaggagtgaaactgctgggtcatatggtaagtgcatgtttcactttttaagaaactgccaaattgttttccaaagtggttgtgccatttcacattcctggcaacactgtatgagagttttagttgctccatatccttgccaatatttggtattgcctttcttttttattttagccattttagtaggtgtatagttgaagcttactgttgttttagtttgcttttccctaatcacaatgatcagcatcttttcatgtgcttattttgagaaatttttggtgaactcatgcctgtcatcccagcactttgataggctgaggcaggcagatcacctgaggtcaggagttcaagaccagcctgggctggtctctactgtgaaaccctgtctctaataaaaccgcacaaaattagctgggtacagtggcaggtgcctgtaatcccagctacttgggaggctgaggcaggagaatcacttgaacccgggatgcggaggttgcagtaacctgagattgtgccactgcactccagcctgtgtgacagaataagactccatctcagaaaaaaaaaaaaaaaagaaaaagaaatatttggtgaagtgccataacattttttcccccttctttccactttctattgttggcttccttggcttttttaatttggatacttggagccatgcactggtttgggtcacaagcactggtaaatgccttaacgttttctttctctataatgaccctggcttcttcctccttgtcggttcctcagcagaaatgcttctcctcttgggcacctctccctttggttgctgggagctgtgctttttcagcccccatgtgtgggcctgtggggactttgtagacttacacaatgctgcagtgatccatgcaattttctcatggatactagctacctttaactcttctaggctgaatcccctgccagcctatactttgattgacatctgatgtgggcattttattactgggtggacagatgcaaatgcagattcagtgtgtaattcagtacattgttgctgttgagacctgcatttgtggattttatggactggctggttgaaccatgtggcaacccattgttgccaagtttggtgaaactagagctctagaaacatgccactctggctgggtcctatgatcctgcggttgcctacatcccctttcccaaggagtacagccaagtagaaagctgcatttgttttctgtttgtttttgtttttgttttgagatggggtgtcactctgtcacccaggctggaatagagtggcttgatctcggctcactgcaatctctgtctcctggactcagctgatcctcccaccttagcctcccgagtagctgggactacaggcatgcaccaccacatccggctaattttttttttttttttaagagattgagttttaccacattgcccaaactggtctcaaactgtttttttatttgcttgtttgtttgtttcttttttgagacagagtctcactctgttgcccaggctggagtgcagttgtgtcatctcagctcactgcaacctccacctcccaggttcaagcaattctcctgcctcaggagaagctgtgattacaggcgcctgccaccatgcccggctattttttgtatttttagtagagacggggtttcaccatgttggccaggctgatctcaatctcctgaccgcaagtgattcgcccacctcggcctcccagagtgctggaattacacatgtgagccgccgctttttgttgttaaacctgtattatatcatcctgttcttcttaatgtattatttggaatagttctcaacctatttactttttgaaatatggctacttacagatggatcctaaacccttcaagggcaaggattaaggtttccaggaaatgcgtaacctttatcaaagcaccacagtgtgtttggatatagaagatccttggtaactgtccattacttaaaactgttagctggttagccttgaattataaaagctatcagtctaatcagccttatagatctgtgatatgagaaagaactactcatatttctggagtatgtaagaaatttcaacatcagaattttaaagctttagagaaactgaaggagacatttcacagatgagaaaactaaaacaccaagaagtacttgcttgagtgcatcagctcctttgcaatgcccttctggatcctttgccatggaactgaccactcaatctctactctcagccccccatatgcctatttaaacttgtcacagttcctgtgacattttattataccttgcttggctgcataaatagggattttgtcttctttgtctttgtagcccaaattcccaagacagttcctggaactgtcaggcacttaatgagggaatgaatggatgagttggtggcagagtgtggctggagtaagtacaaatagaacaaaatacgataacaataatatagtcatgtttctcaagtggctcgtgtgtattaggtaccatggacatggcttatatttattttgaatttaatggtcacaatagctctgtgaagtagatatagctattcttgttttataggggaggaaactgaggcattgagaagtgaagtaatttcctacagtttcacagctataaaaaggcagggctgtcccctgaacctaggcatacgattatggggactgtctgggaactactgcttgagtcatgagaatgtagcgttggccttgctgagaaattcaaatgctgttcctgtcctttctactcttcttttaattggttttcaagggtgattacatgtgtggggtggccatgagtatttctcctccatgtggagatactgatactagaagagttcaagtgaattgataacataggtgaagccactaaaaaatgctttggccaagtcactgaatttgtgtgatcccaatcatttgtgataaggtcataatacttacatttaaggtatgcacaatgtctgctatgtggctgtgaatgaatgattttgcggtttcatcataaggtaaagcttggctgagagaagacagatctcctaggaatttcagcttttcaagttcaccctgaatttgtgggaaaatgataaaaatacaattatatgtcataatcttatttgaataactgtggagagtttttgaaaagtttcttggaatgctttaaatatctgacatctctttcaacccaatatcagtcttttattacaaagaatgagtaaattacggaagatttcagtgaaattccttgtccgctggccctgccttgctttgagacctcggctctcctctcagctccatgttccatcctggctttccccactcttagtctttgcttttctacctgcctgtcctgtgtagtgttgcctgattaagcttcctaggctgggcatggtggctcatgcctgtaatcccagcactttaggaggccgaggtggacagatcacctgaggtcaggagttccagaccagcatggccaacatggtgaaaccctgtctctactaaaaatacaaaaaagtagccaggcgtggtggcgcgtgcctgtgcctgtagtcccagctacttgggaggctgaggcacgagaatcacttgaacctgggaagcggaggttgcagtgagctgagatggtgccgctgcactccagcctgggtgacagagtgagatcccatctcaaaaaaaaaaaagcttcctaaaggtgacctctctgattctgttacttctagttctttcaatgtcattaaaaattcattattttgcttttaaaatttcctattaaaatccaagttctgattggaagaataaaatctctcagtactaacattctctttttcttttttattttattattactattattattattatttttttgacatggagtctcgctctgtcacccaggctggagtgcagtggcacgatctcagctcactgcaacctcaacctcctgggctcaagcaatcctcccgcctcagcctcccaactagctgggaccacaggcacgcaccaccacgtccagctaattatttgtattatgttgcccaggctggtctcaaactcctgagctcaagtgatccacctgccttggcttcccaaagtgctgggatgacgggatgacaggtgagaaccaccatgcctggcctctctttttctttttctttttttttttttttttttgagatggagtctcgctctgtcacccaggctggactgcagtggtacacctgggttcaagtgattctcctgccacagcctcccaagtagctgggactacaggcatgcaccaccacaccaagctaatttttgtatttttagtagagatggggttttatcatcttggccaggctggtctcgaactcctgacctcagatgatctgcctgccttggcctcccaaaatgctgggattacaggcgtgagccactgcacccggcctcttttctaattatacatacatacatatatatataaaattcctatttatcatagaaccttttttttttttttaagacagggtcttgctctgtcatccaggctggagtgcagtggcgtgatcaccactcactgcagtctacatctcctgggctcatgggatccttgtacttcagcctcctgagtagttgggactataggtgtgcttgaacctgggagacggaggttgcaatgagccaaaatcgcgccactgaactatagcttgggtgacagagcaagactctgtctcaaaaaagaaaaaaaaaatctctatatatcttaagacttggagaatgcgtttgctcctgaagcagggtccagtgtcctttcttttttttcttttgagacagagtctcaccctgttgcccaggctggagtgcaatggcatgatcttggctcactgcaacctccgcctcccaggttcaagctattctcctgtctcagcctcccaagtagctgggattacaggcacctgccaccatgcccggctaattttttgtatctttagtagagatgggggtttcaccatgttagccaggctggtgttgaactcctgacctcgtgatctgcccaccttggcctaccaaagtgctgggattacaggtgtgagccactgcgcctggctggtccagtgtcctttctaagtgtatctacaaaccacatgaataaattgctatcacagcacttgcgatactctgacataatgaccttcttattaatctatttccctgactgactgtggaatcagctcaaggcaggtaatgggcttttttgtttcaattcatggcagcaatccaagcccttcattaactacaaagaaatcgaaagaaaaccatgctgatatgaagtataaggattagctgaagtcaaaagtgaaggccaacatgttggctttaaatgttttatttttatttttcattggtattctacataaagaaaatgtacagtttggtggattttcacaaaccaaaaaacaccctgtagccagcaacagattattactagcattcctgaagtttccctcatcctccttccagtggaggctctgtgtggttttgtgtgtatgtgtatgtgtgtgttttgtgtgtgttttggtaaattgacaaattatggttgtatatatttatgcggtacaaagtgacaacatgatttttaaaaatgtatcatacagtaaaactgatttcggcaggaagcatgtggttccatgtgttataacacacacatacacatgtgtaaccatcaccacaatcaggatacgaacagttccaccatcccctaaatttctctcctgctatccctttttagtcacatcctctccccaccctaatgcctaggaatcactaatctgttctgcatcaccatgttttgtcttttcaagaatgtcacacaactggaatcatacagtctgtaaccttttctgattggtttctttcactcaacacaatgcctctgcgattcatctttgctgttgtatcgatagttccctcctttaattgctgaatagtattatattttttgagacagggtctcggtctgtttgtggcccagtttgtttatctgtgaatagtctttaatcttactactccaacttcttccctgcgtctagcatagtgccttataaatggtagctgttcattcattacttgttgattgggtgaatgggatttaaaagccatagaggaccaggcacagcggctcatgcctgtaatcccagcactttgggaggccaaggcatgtggattgcttgaggtcaagagttcaagacctgcttggtcaacatggtgaaacccatgtctactaaaaatacaaaaattagctgggcaatggtggcacgtgcctgtaatcccagctactcaggaggctgaggcaggagaatcacttgaacccgggaggcagaggttgcagtgagctgagattgtgccactgcactccagcctgggcgacagagtgagacactgtctcagaaaaaaaaaaaaaaaaagtctaaaaaaatataaaccaaaatgtcagcagtagttatttgagactggaattagggaagattagcttttaatttttattatggttttctttgtttttacattaatttcataattatatatgtaagtataatttataaatatatgtaaatatatgtattataaatataaaacaaacatgttttataacctataatataaaattatttgtataatcaagaaataatatgtttaaaatatttgttaaaatggaggaataagttggataactcataaaaattgcttgtgcatacctttagctcaccattgaaaaccttctggatggactggatcagtttctcaacaatggcctcactgagcgggtcctgttgggtcaggtgtctggggctatgtgacaggggctcacaatggagtccagggatgtcagggatgtccaagtctaacattgaaagaaagacactggatgatgcctccgtactgtgtaaagtgataaggtttagtatggagtacctctggctcacctttactacttgctctatgaccttaaccaagtcccatcctgtctcctagactcagttttctcaaaaataaattcaatgttctctaagggcctcctaagctacaaaaaacctttgggactgagctgtagcagaatggttaagactatggactttaaatctcaatttgagactagtttgaatcttggctctaccacttactatttgtatgacctttatcaagctagtttgcctcctgaaacctaagtttccttttctgtaaaacagggttattataagaattaaatgaggtaatacatgcaaagaactgatcccagaagtatttcccccttaacacatctttcatctgaagatttttaccattcttttttttttttttttgagacaagagtctcactctgtcgctcaggctggagtacagtggcgcgatcttggctcactacaacctctgcctcctgggttcaagcgattcttgtgcctcagattcccaagtagctggaattacaggcacacgccaccacccccaggtaattttcgtatttttagtagagatgggatttcgctatgttggccaagcaaggtctcgaactcctgacctcaggtgatccacccgcctcagcctcccaaaatgctgggattacagatgtgagccaccgtgcccggccaccactctacttttgcattctttttgatttcttgaatgcctcttcagtaaactctacccacttcctgccatattcctatcatccactaattgcaataattgaagccatgttctcattctgatctgtgcacaggctgttccttctgcctgcatttttctccttcttctcccccaccttcccttacctatctttgccttgctaactcctactcatccttcaagtctcagctccaggatgcctttcgtgtatgccctttttgcctattttggctaagtatccccaagtcactaataaaccgctctgtatccactctggctctcccacccccatcacactgattgcactgagttccatttgcctgttcatccgtaggtatactgtgtctgttctgttcgatgctatatctccagctgctagattaagcttagagcacaggagggcttcattaagtatttgctgaatgaatgtatgaatgaatgaaggtagcttcaaacacaccaggatctttcctgtgtcatgcacatgctgtccccatctatctgtagtactccctatactcacatgagttactctcacatctttcaagcctcctttagatttaaatagcactcatggtctcatacaggtgttctctgacaaccagagtttcaagtaggttcctattgcccttatttttgtctcagcctgttcttccatactgcttactacaagttgtagttacttcagtgactgtttactctttttggtctcttttctgcacaataatgtaagttctatgagggcagtgaccatgttggtcatgtctactgttgtattcccagctcctggtactcaatacatgttttgtagaatgaaagttattctgaagcccaatccagatcttaccttctgcataaagtcctcccactccaaggtatcccacactgccctttccctcctcagaatccctcaagcactcacactcttctgcagaactgtctcaggaccaaccttagtttcctggacatcacgaaccatgtatctcattttgccaactgtatttcaaggtctcaaagtcagggaccaaattcatcatcaaagtctagtcaagggctggtcacccagcaagtactcaatcaatacctcttggcctgagttgaaaatacattctcttttcccctcccctcccctttctagtcctttctcctttttacctgtcagttcaatgctacttgagccttttttaataatctctaagttgctcagctccaaatccacactttctgaatcactgtcataggcacaggggatcactacttcttcctgactacagatcctaggaataaagaggagatgcgaaaaattagttttccaggactgcttctgtctcatcatttatttgaaagcctcaatgtcactttctgagagaggcatttattcatcaccaatctagattaagtagctcccaccatcctggccccacagttaccttcttatttttttcatggtatttaaccaccacctacaattaccttgctcatttggtttatttgtttgactgtctcctatcagactataaactccattagagagaaccctcgtctacatggtcacatttgtatccccaatacctacctagcatgttgtcagtctcattaggagtgaatggataggtaagaaatactatgctgctgttaaaaacaatgctgggtgcaggtggctcacgcctgtaatctcagcactttgggaggctgaggcgggcagatcacctgagatcaggagttcaagaccagcctggccaacatggcaaaacctggtctctactaaaaatacaaaaaatagccgggcatggtggcacatgcctgtaatcccagctactcgggacactaaggcaggagaatcacttcaactgggaggtggaggttgtagtgagccgagattgtgccactgcactccagcctgggtgacatagcaagactccatctcaaaaaacaaacaaacccatcaaaaaaaccagattgaggtagaacacctcaccaaactccctctatcttccttaccctttcctactttttctttttaccatagcacgtaacaccttccaatatatctttcacttgtttatgatgttcattgtcatttatttcctcctgctaaaatgtaagcttcatgagggcaagaatctttggctgctttgttcatgaatgtatcccaggagtctagaacagtgacatacagaagtgctcaacaattattggcagagtaaatgattgagcaggtctctatttactgaatgtttagcatagattcatgaaagaaaaagcaagctgtcaaacaatggatatgacatttttcattaaaacaaaactattttcacaaaagtataagtatatgtgtatacacacagaaacacacacacacaaatgttggcatacatgaaaaaaaacttatggaggctgggtatggtggctcactctgtaatctcagcattttgggaggttgaagtgggaggactgcttgagctcaggacttcgagactagcctgggcaacacggtgagacctcatctctacaaaaaagtaaaaaattggccaggagcggtggctcatacctgtaatcccagcactttgggaggctgaggagggcggatcatgagttcaggagattgagaccatcctggctaacagggtgaaaccccatctctactaaaaaaaaaaaaaacaaaaaaattagccgggcacggtggcgggcgcctgtagtcccagctactcgggaggctgaggcaggagaatggcgtgaacccgggaggtggagcttgcagtaagccgaggttgcaccactgtactccagcccaggcgacagagcgagactccatctcaaaaaaaagaaaaaaaaagtaaaaaattagctaggtgtggtggcatgtgcctgtagtcctagctactcaggaggctgaggcaagatgatcccttaagcccaggagtttaagactgcagagtttaagctatgatggcaccactgcactccagcttgactgacagagagaacttgtctctagaagaaacaaaaacacaacttacggaattcattttttaaaattatttattatttttaatttttattttttttgacacagagtctcactttgtcgctcaggctgaagtgcagtggtgcaatctcagctcactgcaacctctctgcctcctgggttcacgtgattctcatgcctcagccttctgagtagctgggattacaggtgcctgccaccacgcccggctaatttttatatttttagtagagacagggtttcgtcatgttggccaggctggtctcaaactcctgacctcaggtgatctgcccactttggcctcccgaagtgtggggatcacaggcatgagccacggcgcccagccaataaaacaattttggaaggacaccccaaaccaataaagtttgaactctgtcctgtatgcatatatttctttaataaaaaatgagttcattaaaaacaaagaaaccctctaggagcagaatggttgggttgtgtggtagattgtgtaactgacttcttaagatgctgcctggccacgtgttgtgtctcacgcctgtattcccattgcctttgggaggctaaggcgaaaggattgcctgataccaagagtttgagacaagcctgggtaacatagcaaaatccgatctctacaaaaaattagctgggggtggtggcatgtgcctgtagtcccagttactcaggaagccaaggcaagagggtcctagagtccaggaggtgaaggcggcagtgagctatgattccatcactgtattccagcctgagcgacagatggagaccttgcctcgtaaaaaacaaccaccgccagtggctcacgcctgtaatcccagcactttgggaggctgaggtgagtggatcacttgaggtcaggagtttgagaccagcctggccaacatggtgaaaccccgtctctactaaaaatacaaaaaaattcagccaggcagtgtggcgcgcgcctgtaatcccagctactcgggaggctgagacacgagaatcgcttgaacccaggagatggaagttgcagtgaactgagattgtgccattgcactccagcctgggtgacagagggagactttgtctcaaaacaaacaaacaaacaacgaagaagctgtcaatctgtttccaaaatggtcgtaccactttacatttccatcagcaggatatgagagatcctgttgctccacatccttgccaacatttgctattgttggtctttttctttttcattagtcaggtgtggtggctcccatctgtggtccacagctagtcactaggaccacagatgcgagccaccacacctggctaatcaaaattttttttttgtagaggcaggtcttgctgtgttgcccaggtgggtctcgaattcctggactcaagtgatcctcctacctcagcctcccaaaagctctgggattacagactgagccaccattcctggctgcatatgctaagtctgtggtgtaaatactcccatcatggccaaaatcaagctaccaatactaccttgggaagagatgttcaatggcatactgtcatatatttccaccacacagttacaacagatataagcaaccacaaaagcacacaaaacgtaaaatgtagtgaaataattagaaaataatgagttttgttttcaatatactttatttcatcctaaattgatataattttctaaatggctgtatttaaccaatttgcaaaattactgcaaatttaacaatggactctcaagatagtatgagacagctccagcacaccactggttggttgtcttattcttgagctgggagaattctttatatattctacatcagcactgcccaatggaactttctgcaataatgaagatgtcctataattttgagtggtccaatctgatatccactagttatctgtggctactgagcacttgaaatgtggctagtacaaatgagagactgaattttaaattttacttaattttaatccatttaaattcaaatttaaatatccacataaggctagtggctatcataacagacacagaaagaactgactctctcccatgcgggataacatttgggacaataataacgttaataagagttatattgtgcatactttatatgttcataaaactgtagttaaaagcacagattctggagtcagctgcctaggttcaaatctgtttccttctctttaaaatgggattagcctgtaatctcagcactttgggaggctaaggccgaaggatcctttgagcccgagttccagaccagcctgggcaacaaagcgagacgcggtatctaccaaaaataattttaaagattagctgggcgtggtgtcgcaaggcagcagtcccagctactccggaggctgaggcgggagggaagattgcttgagcccaggatgtcgaggctgcagtaagctgtgatcgcaccactgcactccagcctgggcgacagagcaagatcccgtatcaataaaaaaggaaagaaaagaaataatgcttgtagagcgttcggcacagtgtcgggttatactgtaaacattcagtagttggcgctagttattagagcggtgttcctggatgagccacctccatgttgagcctgtaaaactggcctaatatgttctctatgagtcactgcattgctctgcaaatcagataaaacgtcactcgtaggtcagttattaacaaccccactgataatctttggaaaaaactgacataattttctttttcttttttttttggtgagacggagatttactcgttgcccaggctggagtgcaatggcgcgatcttggctcaccgcatcctccgcctcccaggtccaagcgattctcctgcctcaggctcccgagtagctgggattacaggcatgtgtgaccacgcccggctaattttgtatttttagtagagacggggtttcaccgtgttgcccaggctgatctcgaactcctcacctcaggtaatccgcccgcctcggcctcccaaagttctgggattacaggcgtgagccactgcgcccggccagaaactgccacaattttctaaagaggaaaaaaaaatcccttctaagctatcccctcccgacgagacccttcctgttcctttaaaatgggccgggcagcagaaagacgagtgagtgacagcagacaggccaatcagaagcggccccgtctcgggcccaccccgaggcctggcccaaccgcgtcccggtagctcccggaataggagcgttgcgagacggtcggttccaagtgggcctgggcgcgggggagaggcgggtctgtcctcgggaactgcaaggccctgtgagcgggaggactgggatcccggccgcggctgctggaagcgtcgaagctcagcggggccgcggacactgacctgtgcttagaactcatcctggcccgcagagcctgccgcgagtccctggcgtcccctgtggcgggctcttggagccactttcccgagcggaagtcagcccgcggctcggactccggcgggacctgctcggaggaatggcgccgccgggtgaggagttgcgcgtggctttggggagagggctgtcgcccgcgggaggttactagtcgccgctcgagagccggccaggcgggatccccttcccctgcgggacaggggcatgggcacaagctctggctggggcgctctcggatcgagggtccgaaggagggctgcgagctggtgggagtgcccgcgacctggcggggttggtgcctgggggaggggtgcagcgcggagctacgggtcgccccgaggctcagccgtggggaccgcggacgcgcttagcctaggtctggcctcattcatttcactcgcgcgggcttctgggccaggcggcctaaggttctggtcccggcgctgccccttactccgtgtgaggttttgggcagattgtccttctttgtgctgtagtttcccattcagtgaaaggggcaaagaaaaccctcacttctctctgggagcctggagcataagttctcaagtgacactctaggtgcaaacttgcagtcggccacgtattcattgtgtaacccaaagcaggttacttaacccctctacacctcagtttctcatctgtaaaataagttagtcaaattagtcacgttatctgcctcgttgagttgctttattaagtgaaataatcttcgtgcttagtttagaacagtgcatggccctaggtaagaactaagttaactgcattggaagttactgagtagacgctgtgcagggtggaatttcatgtagcctcatcgtaactttggaagcatgtactcttgttactaccatttgacagatgagaagttggaatcccacggaagggaacttacttgcccagggtgacacatgaatgagtcagtggctcaccgtttcattatttgagaagttcaggatagtaaagtggttaaaagcagactttggattcaaattgcctgaagtttgattttcagtgatgtgtcctagggcaggtaactacttctgagccttactttcctggtctgtgaaatgcagaaaatagccaccttgcttagatgttgtgaggatttaatgatttggtgtgtgcaaagcacagcatagcgtgggcatacctaacatattaagtgctcaacttttagtcagaaaagttactgctctcgttaacatggagtgagaagattaggattctgacacaggtgctgttttaggggaatttacggtctaggtgggaaaatgctagtcgcagccattcactagatcttcatatattgggtacccgcctgtgcacaaggcattggggattcagcattagtatcttgactccgctctctcttaggtctttctgtccattagcagtttctgataggctttgactttgaattctagccagactaactctcatcacttctcatcatgttcactgctgttgccctggtttgggccaccatcatcttctggcttggattatggcggtagtctcccaactggtgtcccctgctctgtccttgcacctgcatggtctgttctccacacagtattgtttattctcaacacagtaataccattagagtgtaagtcaaatcactcctctgcttagaactttccagtggtctccagccgggtgcggtagctcacgcctgtaatcccagcactttgggaggctgaggcgggcggatcacgaggtcaagagatcaagaccatcctggccaacatggtgaaaccccgtctctactaaaaagacaaaaattagctgggcatggtggcacgtgcctgtagtcctagctacttgggaggctgaggcaggagaatcgcttgaacccgggaggcggaggctgcagtgagccgagatcgcgccactgcactccagcctggcaacagagcgagactctgtctaaaaaaaaaaaaaagaactttccagtggcttccactacggtggtatacaaggccctctggatttgtcctctgctacctctgttacctcatctacttcttaccctttgcttattccactcaagctgtactgtccttgctgatctcaaaaaacactgtatgtgtacatactcctgattcagaatgtttgcatttggtttttcttttcttttttttttttttttttgagacagagccccaggctggagtgcagtggcacgatctcagctcactgcccactctgcttcccagatcaagtgattctcgtgcttcagcctccctagtagctgggattacaggccaagtcaccatgtgcggctcatgttttgtatttttagtagacatggggtttcaccatgttggccaggtttgtcttgaactcccgacctcaggtgatccccctgccttggcctcccaaagtgctggggttagaggtgtgagccactgcgcctggccatattgggtttttcttcttagcatagtttcccaccagatatctttatgacttgcttcttcttcagatctgtactcaatatgtttatttcttagtccttcatagactaccgtatttaaaatgcagcccttcccaaatatctcttctgtactttatttttttccatagcacttactttgtaatgtgataaataatgttatttcatgtgatgtcttttgtcactagaatagaagctctttgagggtgggagttttgtttcttttgtttcctgctgtatttttaacacctaaagtagtgtgtggcacatagtagctcagtatacatttgatgaatacaccacgtgatagattttttctttttttaatttaattttatttatttatttttatttttttgagatggagtctcactctgtcacccaggctggagtgcagtggtgcgatctcggctcactgcaacttccgcctcctgggtttaagtgattctcctgcctcagcctcccaagtagtttggattacaggcacccaccatcacacctggctaatttttgtctttttagtagagacagggtttcaccatgttggccaggctggtcttgaactcctgacttcaagtgatccgcccacctcggcctcccaaagtgctgggattacaggcgtgagctactgtgcccagctgtcttttatttttttgagacagggtctctctttctcacccagggtggagtgccatggtgtgatctcagctcactgcagtctcaacctcctgggctcaagtgatcctcctacctccgcctcccgagtagctgggactacaggcacacgccaccatgcctggctaatttttgtattttcttttttgtagagaaagggtttcgccatgtcgcctggtctagtcttgaactcctgggctcaagcatccgcctgcctcagcctccccaagtgttgggattacagaagtgagccagtgccgctggccaatagtgccttttttcaaggattctagttcaagcttaatttaacactaaaggcaaaggatttagggccactcatgttagcctagtgattatttgttactgctgttacttgggtgccagacaatgcactttatcaagaagcagcccattcaaaagtgttttttgttttgtttttttaaataaatgaagtagaaatgtaccactcctgcagcttcctgtcccctggggcatcatagatggggattaatttttcttttcatttattcagcaaatatttattcagtaactatgtgccaggcagtgtgcaagacttggaaatactgggatgaacaaaagaagcagtctttatcctcatggaacttacagtttagcagagaaatcagacattacgctgttaaagttgtagaaaatcccacagagaagtacagattgctatgagtggatataagcacaacaataataatagtagtagaagtagtagctaacattgatatagcatttgttatgtgccagtcattattctaagatttttttttttttgagacggagttttgctcttgtcactcaggttggcaacaatggcgcattctcagctctctgcaacctcttgtctcccaggttcaagcgattctcctgcctcagcctcccaagtagctgggattacaggcacctgccaccacacccagctaatttttttgtatttttagtagaggcggggtttcaccatgttggccaggctggcctcaaattcctgacctcaggtgatccacctgcctcggcctcccaaagtgctggcccggccagatctttctgtattaactcgtgtaattgtacctgaggtagatactattatcactttacactttaggaaactgaggcaccagctggttgaataactgccaagggcacattgctaataaatggcagaggtgtgatttaagcctggccccagagtctgggttcttccttacattattgtactggggaactaatcctagggagagctgcttaaggaagaggtgcttgagctgaattctgaaagtaaaaattaagccaagttgaggtaaaaacatggaaaaatgctgagcaggaaagaacctggcttcttagaggacagagaagaagccagagagcaacagatagcgggaagcgcgagggaggagatctggttgagaggctggcaaggtgtgaggattcaggattgggtttgtccttagaggcagaggacttacagacatctttcagatgggaatagtaggataaggcctgtgctttagatgcttggaggctgctgggaggactgtccttccaccagttgaagagcaggctccctgccttcccaaggcttctcctcaggttaaacccctggattccctcgcccttccccatgtgatttggttcccagatcttggtgtgcatcatcattgggactgtgtatagcaccttggaagagtgtagagtgtactgaatggttgtttccccccaaggttcaagcactgtcttcctgttggccctgacaatcatagccagcacctgggctctgacgcccactcactacctcaccaagcatgacgtggagagactaaaagcctcgctggatcgccctttcacaaatttggaatctgccttctactccatcgtgggactcagcagccttggtgctcaggtgccagatgcaaaggtaaggctgcttttgtcctggtggtcagggtggttcaggagaaccttcatcccctcactatattcctttggggtagttcaaaactaactcttgctcatttgaggataaccaaggttaatccaatataagaaatatttggccaggcgtggtgactcacgcctgtaatgccagcactttgggaggtctaggcaggtggatcacgaggtcaggagttcgagaccagcctggccagtgcagtgaaaccctgactctgctaaaaatagaaaaaattagctgggtgtggtggtgcatgcctgtaatcccagctactcaggaggctgaggcaggagaatcgtgtgaacccaggaggcagaggttgcagtgagctgagatcccgccattgcactccagcccaggcaacagtgtgagactcagtctcaaaaaaagaagtttatttcagtttgacagatctgtttttgtttttgtttttttgcctaatgtatgttaaggatcataccagatcagttatttttagtgggatgtcaagaagagcaagcatagatcatctagaaacttttacttcagctctgggagtgagactgtccaataacacatgtacttactaagtgcccccctatgtgtgtggctaataataagggaattcaaggtggaaggcactcacatgtattaaataatggtagtcactacatcaggcaattttgatacatgtttttggacttctggtgaggaaaatgcattatgattaaaacctttcctggattcgggacagtctttttttttttttttttgagacagagtctggctcacccaggctagagtgcagtggcatgatcatggctcactgcagtctctgtctcctgggctcaagccatccacctcagcttccctagtagctgggactacaggtgtgcaccaccatgcctggcaatttttgtattttttcgttagagatggggttttgccatgttgcccaggctggtcttaaactcctgggctcaagtgatccacctgcctcagcctcccaaagtgttgagattacaggtgtgagccaccacctgaccaggaacagtcttaaagtgaatttacattttattcattatagtagtatggacaactagactaaacaattttcctttgccaagtttctcatatctgccttagttttctttgactgaagaacaaattaccataaatgtaggggcttaaaacaccaccgacttattggcttatatggcttatagttctttattttattttatttaagagagggtctcactgtgttgcccaggctggagtgcagtggctattcacaggcatgattatagcacactataacctcgaactcctgggctcaagtgatcctcctgtctcagcttcctgagtacctgggactatgggtgcatcccaccgcaccccgctgttagctgataatcctgcaggtcagaagtctagacaggcttgcctgggccctctgcttagtgtctcctgaggtcaaagtgaaggcattggccaaactgggctcctcccggaagcactggagaagaatctgcctccaggcccattcatgttgtcgtattgtcagcaaaatccagttcctgtggttgtgggcctgaggtctccatttccttgctagctgtctgctaggagttgctctctgttcctcaaggccattggtatttcttctcacatggcccctccacctttaaaccagtaatggcatggtgagtccttactcttcaattctctctgacttcctcttcagccaccagccagagaaaactgctattaaagggttcacctgtttgggtcagcccacctggataatctctgaattgtaaggtcagctgacttggggctttaattatacctgcaaaatcactttataacagttcctaaatttgtgtttaaatgaataatcagtggatggaaatccagggggaggagtatgaatgtctttagaattctgcctaccatttcttgtattagcatggaaatgactccaaatctgtagggactttaggcatacactactgcacctggcttgctggatggagtgtcttcaagcaaatatcagacatattgttgtacttgtatctcttattctatttatttatttattttgtagagatgaggtctcgctatgttgcctaggctggtgtcatgaactgacctcaagcaatcctcctgccacggcctctcaaagtgttgggattacaggcatgagccattgtgcctgaccaacagtaattctttaatgtcatttaattctcagtctatgttcagttatcttgagttatctcaaaagtgttttttacagttagttggcttaaatcaggatctaaagaaggtctacacattccattttttgctggtatctcttaagactcttttcaccgataatagttcccattccctcttttctccccataccatttatttgtggaataagtcaggtcatttgtcctggaatattttccacattctgcctttgattaattgtatcttcatgatgtttttgaacatatttccctatcctttgtatccctgtaaactgatagttagctcttgaggctaaattatattcagggttggttttcttggtgaaaatatttcacaggtggtgctgtggacttcctattaatagatacataatatctggttatttcacttttagtgatgatgaagttgtaaattaaggtgttgtcagactaatctatcgcttataaatagtatatagtagggatttgttttttcatccagtctgataatttctaccttttgattggggagtttattccatttatttttttattttgattctttttttatgtttaagatcaatcatttggcggggcgcggtggctcaagcctgtaatcccagcactttgggaggccgaggcgggcggatcacgaggtcaggagatcgagaccatcccggctaaaacggtgaaacaccgtctctactaaaaatacaaaaaattagccgggcgtagtggcgggcgcctgtagtcccagctacttgggaggctgaggcaggagaatggcgtgaacccgggaggcggagcttgcagtgagccgagatcccgccactgcactccagcctgggcgacagagcgagactccgtctcaaaaaaaaaaaaaaaaaaagatcaatcatttatgtttaattatattgttgggtttacatctgtcatcttgttatttgtttcctattggcttacctgtttttccctctcttttcctgtcttatttttatattttattttgttttattttatttttttgagacagggtctcactcttgtcacccaggctggagtgcagtggtgtgatctctgctcactgtgacctctgcctcccgggttcaagtgatcctcccatctcagcctcctaagtagctgggattacagacgcgcaccaccatgcctggctaattttttgtattttttggtagagatggggtttcaccatgttggccaggctggtcttgaactcctgacctcaagtgatttgccctcctcggcctcccaaaatgctgggattacacgcgtgagccactgcgcccagccccttgattatttttaaatattctgttttatatcttctattgactgttcagatctaatttttttttagtgtttgtctagttttgtttagagattttaatatgcatccttaatttctcacggtatatcttgaattattattttgccatgtcacaaatagtaaaagaaccctataactgtatttgcatttaaactctcatcatttctgctatcattgtcatactttttgtttgtttgtttttgtttttgagatgaaggcttactctgttgccaagctggagtgcagtggcgcgatcttggcccactgcaacctccgcctgctgggttcaagcgattcccctgcctcagcctcctataggtgcacgccaccacacccagctgattttttgtattttggtagagacgaggtttcactatgttggccaggatagtctccatctcctgaccttgtgatctgcccgtcttggcctcccaaagtgctgggattacaggtgtgagccaccgcgcccggcccattgtcgtactttttaaccttctttcaaggatcccagcctttgctgtctgttgttcagtgtctcaatttcatatatttcatacagttttatagttatttttggtaggaagggaagttcaatatatttaattctgtcaagggcagaattgatagtcccaattggtgtctttttttttttttctgagacaaggcctcgctctgttgcccaggttggagtgcagtggtgcgatcatggttcactgcagcctcaaacttctggactcaggtgatccttcacctctgcccctcgagtagctgggactacagtcacctgtcaccatgcctagctaaattttttttttttttaatatttgtagagacggtgttgccatgttgcccagggttgtctcaaactcctcgggtcaagccatcctcctgcctctgcctcccaaagtgctgggattatggacatgaaccactgtgcccagcctccaattgatgtctttttttgttgtttgtttgacatggagtcttactgtcatccgggctggagtgcagttttgtagtcttagctcactgcaacctccgcctcgtaggttcaagtgatcctccagcctcagcctcccaagtagctgggactacaggcattctccaccacgcctggctaatttttgtgttttttggtagtgacaggattttgccatgttggccaggctggtcctgaactcttgacctcaggtgatccacccgccttggcctcccaaagtgctgggattataggtgtgagccacccctctcagcaattgatatctttcaatccatttcaattgttatcctttttggtgctcaaaatgttccatttttgccaatgggccaaactgtgtgtgtgtatgtgtgtgtgtgtgtgtgtgtgtgtgtgtgtgtgtgtgaacatccattcatttacacattgggtacaactggttttcagtttaactgtagagttaaatagttactagactggccagaaagcctaaagtatttaccaactggtcctttacagaaaaagtttgctaatcgcagctatatgagatccagcttactcaaattttttcctgacaaccagctctccgtttctgcccaatgttttcttcctgtgtgtgactctattaaagatacagacgtttcctcatgattacactcttataaaccctaaaggtgaatgtacctcctgataaaattagttctgctcaaaagtaagagtatacccatcagagtcagttaactcaagcttttaattctggctccacctctctgcaaagggagttatgaagcctacctcactgaatcattgtaagaagaaagtgaaattacagtatgcccctcaaaggaaatggtagctattatcgttcttacattgaaaaggtttgcttctatttatactttgtttaggtgagttcagacaatgcctggcacagacactgtattcgcagtgccttttgtagtgatgcttcgtacttctgctctggtttttggtgatgtctttagaggccctggggagagagaaagagcaaattgactagaggttttgtattgtgaggtataggagataacattgaaatagtaatgttaacctctggcaggatttgaatgcaggatgaaaagtttctcctgaaggttttcaaacttttgtggaaccacaggattcggtgtagggggtcacggaggaatgaggtgctcccacttcatccagagcatgtcttttgatctgtgtcgtgatttggagttctataggagatttaggttgaacacatacccccaaagctattctctgccatcatcacaagtttgcgggatgttggttagggctgaagatgtagattgagaggcatccggccagctgccatgcagtgtgacttgggataattacatgattgggctggctgtggctttatgtttacaatacagacgctgaagtcagagtggttgccttcaaggtgttaacttcaaaacttcacacctgagtcacctgtgcagcttatttaacctttcaaaattgttgttctgtcatcggtaagatggagataataatactcagctcacagataatgtgtgcagggtagttagcacgttgatggcatgtggtaatacgtagtattacccttatgagtagtatgactatatataaatagtagtagcagttggtacacattgattgacatttttttttcagactgtcatcctcactgcttagcatacatctgacacacgggtgtctaacaaatatttgaactgtagactttagctcaatcaaaatgggagctctctaaatgtgcctgctaatcagaaaataaataggttaatcacatactccattctaattgcttatgaaatgtgctgtgttgattaggtggtgtgtgcattataagtaatggaagaaagggagttgtatgcatgtttcagagctgttgaatttcctcattagatgtgcaaactacataaatccattgagagatttatgtcattactgtcacttccgtgtagcggtgcatgtcctgctcagctgttgctgccttcagctcagtagagagaactccctgggctcccctagatacactgttgcctattctcacagatcgatatatttggagagattttggttattatctcgtaagaggttttagcagcaaaactgggagaaatggggtttaatgagaatagaaactatggagacagcagtgtggaatgagagttgattttaggtgttataaagtgtgagcatcggctgggtgcggtgtctcaggcctgtaatctcagcactttgggaggctgaggttggtggatcccttgaggtcaggagttcgagaccagcctggccaacacggcaaaaccctgtctttactaaaaatacagaagttagctgggcgtggtgggcatgcctgtaatcccagctactcgggaggccgaggcaggagaattgcttgaacccagaggcagaggttttgcagtgagctgagactgtgctgctacactctagcctgggtgacagagcgagaccctgtctcaaaaaaaaggccaggcgcggtggctcacacgtgtaatcccagtactttggggatgccgaggcaggcggatcacgaggtcaggcaatcaagaccatcctggctaatacagtgaaaccccgtctctactaaaaatacaaaaaaattagctgggcgtggtggcgggtgcctgtagtcccagctactttttttttttttgagactctgtctcaaaagaaagaaagagtgagcatttttcatttgagttatatttatataaaacataagcatgtcagaaaggtgattttacagatatcattatttagctttttacaagattaagaacatgctgggcacagtggcttatgcctgtaattccagcactttgggaggctggggtgggaggatcacttgaggtcaggagttggagactagcctgggcaacatagtgagacacccgccccccacccccgatttctgcaaaaagtaaaattagatgggcatggtggcatgcacctctagtcctagctatttaggtggctgaggcagaaaggcagggatattgcttgagcccaggagtttaaggctgcagttagctgtgatggcaccactgcagtccagcctgggcaacaaagcaagaccctgtctcaaagaaaccaaattactttaaaaaaatgcctcccttataaagcgttgtgagcattaaatgagataataagtgtaaagtgcttagtgtagtgcctggcacatgatgagtgcatatagtagtaagtatatttgtttgtgggtcaggcactagttcattcctggggatagcagagaatgaggcaatccttcacgcagtaatcatttatggagcatctgctgtgtgccagacattgtgctaagtgcagagaagacaagagagctcattatccattgagagtaccataatacagtgctaagtgccaagaggcagacaggctgtttgtggaaagtaccatgggagtccagcagagggagccggcactcaccctgtctgccaagaaagccacaatcttgcactggagtgctgccatctgtgctggctgctgcaggcttcatttggtcactcagcaaatatatagtgagtttctgctgtgcactaggtatagtgctaggcactggggatttactcttgagccataaagagggagagggcccctgcactcttaagaatatgttgtctaatagctgagacaggcattaatcatgtaatcaaatacatgcacgaatatttgcaacaatggtaagttttatgaaggggagatatgtgctgttataaataggggattttataggggtagaataggggactttgatttgccaggaaaggctttcctgaggaaatctccgaatttaaatctcattgtgggctgagtgtgttggctcacacctataatcctagcactttggaaggctgaggcaggaggattgcctgaagccaggagtctgaaaccagcctgggcaacaaaatgagaccctgtctctacaaaaagtaaaaaaaaattatctggtgtagtggtgtgtgcctgtagtcccaactactcaggaggctgaggatggaggatcgctggagcccaggagttggaggctgcagtgagctacgatcatgccactgcactccagcctgtgtgagagggcaagaccctgtctcaaaacaaaaacaaaacaaaccccaaacccaaaactcaaacctctctgcatcaccctaatctcactctactccttaagggcagggactttgtctattttatttgttgtgtatccccagttcctagaacagcacctggcatgtggtaggcactgaagtgaaggaagatgtgattgatctgaattctaaagggagaggaggagttaactgtgagacgaaggagagaagggacttcaggcagaggaaacagcctgtgcggaggatagagagcaggttacatttgagattgaaaggaggaggtgtgtggaacagagtgggagggagggagaggagtgaggcaggctggggccaagccatagtgccttggcccacataggaagagttctgatctgtttccaatgagcaatatattttaaatagctagtatcgtgattcaccttgcattttggaaagacttctctcttgctttttggaagacagactatagcagggggctacagggcaagattgaatgcaggaggggtacaaaagataatgcctggactttctgcttctgctgcatggatgggtagttgggccattccatgagatagcaacacaggaagacaatgaggtttgtctgggaaagatcacgaatttggtctttaccatggtgagcttgaaatacctttgagtcatgtaagtggctgttgagagaagtctgggctggaggtacgggtctgagaattatctgcatagaattttgggatgaagccatgggcatggatgggatggcctagggaggcagggggtggtgggatgagagccaggcctaggagctgagaaacagcaggagagctcaaaactgagggaggagctgccagagaagtaggagacccagcagggtgcggtggcatcccagaaggctacgggcgcgcatgtttcccagtgaggacgtgatcggtctgtccattgttgaggagtgagcactggaaaatgtcctctgcttcgacaatttggaggttgccactggcctgctgggggcagaagccaaattggaatgagtggaggtgaggacatgaagactggagcagtgtggctgtgtgggaagagagaaggtggcactggaggggagagaagggttgagggaaattgttgttgttgttgttgttgttgtttgaaagtttcgctcttgtcacccaggctggagtgctgtggctcgatctcggctcactgcaacctccgcctcccaggttcaagcgattcttctacctcagcctcccaagtagctgggactacaggtgcacacccccacgcctggctaatttttgtatttttagtagagatggagtttcaccatgttggtcaggctggtctcgaactcctgacctcaggtgatccacccgcctcagcctcccaaagtgctgggatcacaggcgtgagccatcacgcccagccaggaagttgtattttaaaataagtcttgagttttgttaatacattataggagaagttgaattgacgaggtaatgggcttccagatggagagacagggtgtacaaagcctggaggcttccaagtgcttgttgtgctttggggcagtgaggtgcttgtgcaactggagcagagatgggtggggaagtgcagtaggaagcacctggggaaaagcgggcctggttagaaagggtctggcgtggggccccagccagtgtgtgcctgggcagcacatcacagtaacaaagtctgaagagatgacaaagcacagtctgagaggcagccagagtagcggggagctgtttatggaggaaataggggaggggagggcagatgagagagatttgcggtcttttctataggcctccgtatttgattaggttcagggagttgtaggggaaaacctatgatggaagaaagcactggtgttctttgctcaagagggtgtttgattaattggggtattagcacagaaagttggaagcaagcagatcgggggtggacatttagggggcagttttcagccttcagtcgggaagatgagtctagaacgttggagggcagctggagtcagagtttccagtcccccgacagtagctggctgaagcctcagcactgggtgggctcactgagcaggctgagcatgttctgggaggtgtccctgcttctgctgctgtgtaaactccgccgtcaacatcttgggctttgaagccactgaacgccggactggtttaccttgatttgtctttgcaaagtgtaggaatgatgcttgtcttactccagaatagattgtttttagtgggctcttgagaagtggaggttttatagctcagacaccagagccaggctcttctggagccagggaattctagttcccctagttaaaagctgagtgactttggacaagttactttgcctttataatgcctcagttttcttacctgtaaacttaaggtgataagagtgcctgatccatgagatagattggggattaaatgagaaatgcacataaagcacttagaacagcgtttgacacattttaagtgctcagaaagaggtaatgatagaggtagaagtagaggtagtcattgttttggggtctccagtgttgtcgttccattgttaaagcaccagatggcgacaaagcacacattttcagctgccttgcattcccctgcttggactccttgagtagctttacttattctcttcagatccctaattgatgcaaagtgaagtattttgtttgtttcctttctctctctggcttctttaaaacttctggttgaaactcatttgttttgagactcttatttaaatttcattcataaaattaaaaaaatgctttggttggagtagcatgtacacacagtaaaacattggacaatacaaaatagctgttagtgaaaggcagcgtgctgcccttgccctccaccctgtcctactctccaggagcaccccgcgctttttttttttggtgggagaggagtctcactctgtcgtccaggctggagtgcagtggcacgatctcggctcactgcaacctctgcctcccgggttcaagggattctcctgcttcagcctcctgagtagctggaactacaggtgagcgccaccgtgcctagtctcccccccacctttttttttttgagacggagtctcgctctgtcgcccaggctggagtgcagtggcacgatcttggctcactgcaagctctgcctcccgggttcacatcagtctcccgcctcaagcctcccgagtagctgggactacaggtgcccaccaccacgcccagctaattttgtttttgtgtttttagtagagatggggtttcaccgtgttagccaggatggtctcgatctcctgaccttgtgatctgctcgccttgacctcccaaagtgctggtattacaggtgtgagccaccgcgcccagcctttttcttttttttgagacaggatgttgccctgccacccatgccagactgcagtggtgtaatcacagctcactgcagcctcaaacgattctccaacctcaccttcataaagtgttaggattacaggcgtgagccactgtgcccagccagcacccacttttaactgttattattaccacatctttttgaatagctgaattttatattacttcagccaaaatattggcagtctattgatttgatactgtttcttggagtcgaggagagtcgtagtagcgggggcttggcgattttgtgatgtgtttcctttgtgccagtcactgtgatgggcatttggcaaagtccctgatcttgggccactagtcactgggggaactagtaagtgcagtgtggtacgtgctttgggggagcacttgagagggtggatacctggcctctcctgggaggactgtcaggaagaggtgaacatctgagcagagttgaagataggacctggtttggcaggcaggaaggacaaggaaaaggtgctcccggcagggtgggtagcagggtcaaacacgtcaaatggcgagagcgtggtatagctgcaggaggctagagggtaagattttggagttggagttagggctatggtgatgcaggcagcatggagagggagggtcagtcttgagggcatttcatgctgtgtcagaagttggatcttgtctgagaaaaacagggaaccactgaagggttttaaaggtaaagcaacacggttacacttgtattttgtgaagatcagtcttgaagcagtgtgcagaatggattgcatggctttagaccgcttaggagatgactgactgggacaatgtaggtgagaaatggcaagggcctgctgtaaggcagtgacagaaaccagaggcgggactgggcctgagaaatgaaaaagaggtagacttgataggcttggagggtggggaaaagtcaaggatggttcccatgtttctggtttgggttgctggatgcatggtattacctgtgcatgagctgggaagtcctggtgaagaaatagaaggttttaagctcattttcttttttatttttatttttttgggggactgggtctcgctctgtctcccagactggagtgtagtggcatgaacatggctcactgcagcctcaacttcaagcagtcctcctacctcagcctcccaggtagctgggaccacaggcatgcgccacctgctctgctactttttgaattttttgtggagatggggtcttaccatgttacccaggctggtctcaactcctgagctcaagcagtcctgcctcagcctcccaaaggcctgggattacagatgtgagccactgcacccagcgttaagctcattttagatttgttgagcctgacttggccttggtgacatctaagtggagatgccagtaaagttggaatcagaagagactgccacttggtagctttgtcaccttcatcaggttacttgccaatttggagccccagtttctttttcaggtaaatggggatagtgataatctctaccaaaggatcatgttgttaaaaggaagagcttcctaaatacccagcacagtccatggccagacaggtgatccgggaagtggtttccttctttcctttctaaggttcggaaggactcaagcgccttcaggcttattgctctttgtacgaagtgagcaattttgggtaataccgtgtcctatggaaagtaactacttaactaaattcatgtagctcattccttaagccatctataatggctgagaatgttatctaaaaacgcctttgcttttcctggttcactacatgtgtcaccacttaacattgacttttccccactgtgtagaaagcatgtacctacatcagatctaaccttgatcccagcaatgtggattccctcttctacgctgcccaggccagccaggccctctcaggatgtgaggtgagtccgggttcctacgctgacaatgactttaactatttaaagtacatttttaaaggggaggagtcatgtcaaacatcctttttttaattatgagagtccattattgtgagtgggaattccattcctgtgattttttttttccttaagaaagtatagtttatgtttctcctaagtttttacttttcaagggttttaaataacctttttgtacagtttttgcttttcttctggtaggtcttgattttttcctttccatctgcctttaacacgtaaaaatgttcaaagtgtacccccacacgaggtttctggaagtcattttgttgaacataggagaaccatataagtagaaaggtaacttgtcagcatcttttcacatgggagtgttgtaccgaagttttgcaaacatttcatcctggtgtctggggattagagggggatgagcatgtgcgaggcggaggtgactttggcagctgctccgcattctgtctttgccatgcctgccacaaattgccaagacctgttctaaaactctgtgtctgccaattctttcttagatctctatttcaaatgagaccaaagatctgcttctggcagctgtcagtgaggactcatctgttacccagatctaccatgcagttgcagctctaagtggctttggccttcccttggcatcccaagaagcactcagtgcccttactgctcgtctcagcaaggaggagactgtgctggcgtgagttgtcatctcgagcatttctcaggcttcatttgtctcgggtcctatccgaagagggctcattcattggttcagcaaatactttctgggcaagtacttgcagtaaatacttccgtgtgccaggtgctctgcaaggcaccgcagacatgattgcatgaaggcaagtaaggtccgtgtcctcgtggagctcacatggacacagtcttctgcaagcctcgcagacagaaggcaagcgctgagccagagcatgagcacaccaccacctagagatccagttgccttgtgcggttggagggctagagcaagggcagataactgagaaggagccacgtgcatgtcttgttgaggcttggctagggcaggatgacatgttggcagtggaggctctgcaaagtgggggctctcaggatccctggaagttgtgaaagacagcatctggtgggtgaggtggttgctcagagggtggagtattctaggaatcagactctactactctgcaaaaggcttaggtgaaggagaagcacctttcctatttgttataaatggaaatattgtaacttcagggtgttttttgctaagctcttaagtgataatatatgtagttttaaatttttatttatttagagacaggatctcactctgtcacccaggctgaagtgcaatggtatgatcaaactcactgcagccttgaactctgggctcaagtgattttcctacctcagcctcccgagtagctggactacaggtgcaaactaccacgcctagctaatttttttttttttttgagacgtggtcttactctgttacccaggctagagtgcagtgacgcgatctcagttcactgcaacctccgcctcccgggttcaagcagttctcctgcctcagcgtcttcagtggctgggattacaggcgcgccaccacgcctggccaatttttgtatttttagtagagacagggtttcaccatgttggccaggtcttgaactcctgacctcaagcaatctacctgccttggcctcccaaagtgctgggattacaggcgtgagccacagcgcccggctgcccagctaatttttttagtttttagtggagatggggcctgtctgtgttgtccaggccggttgtaatttttttttttttaacacttaaactgctcctttaaaacaatattttttttgtcattttatttgtgttcaccgtttcactgcaaaccctgaaggagggtgtggagcaccgttctggaatcccgttcgttgtttagcaagaggttggtgataccaaatccccctttcaaaacagtgagattgtttcccaggtttttttgtttgttttttgtttttttgctgacaaccagattttctgtaaacttaaagctttgttaaggacagggttcacaggcaattgacattccctctctgtccctcctcacaccctccctatattcacatggtcaatcatcagtgactctagggctgacattttgtacacactttgtccagtgcttggcccttttgggcctttgatttcaggtgacatattttgatatctgcttttaatccctcatggggaatgcttctccagtcaccatcatctcatgccatgatgccactgttagtgcctgtgccttactttgatgctaccttctacaaaaaaaattcccatttccttccaagcagaagggaaaatccccttcctcaaaaccccagaaccccaggaagaagtacaagggaagtacgtccactttggagtcagacagacttaggtttgaacaccagctatttcattccttgtgtctgactttggccaaatttctaacttctctgagccttgcctttaaaatgaaacccataattcttacatcaaagcaactgacaggattaaatgagataataggtgtgaagaccctagcgcagtgcctggttcttggtgggcgtgtaggaaacggagttccttttctggaccatttgtttgttaggtccctaacaaacaggtcccccttcttagagagtttgttacttccttcgttgttgttatttgtatgttaggtcataagcttttttttttttttttttgagacagggtctcactgtgtcatctaggctgcagtgcaatgcgatcatatttaaagctcactacaacctcaaactcttgggcgtgagcgattctcccaccttagccttctgagtagctgggactataatcacatgccaccacacccagccataagctttacttgcagtgcttagagagcctggcacatggtctgtacccaacggagttaataaaggatgaaactatacttttgtgtttctgttgtcttgtagaaagctcataggtaggaagaacatacgctttggagcagaaagaactgtgttcaaatccattcttctactcaacctctgtgaccatgagtgggttgtttagcccgcctaaacctcagtgttctcatatgcaaacctggagaatgtctcgtagggtcattgtgaaatccaactggtaggttgccttatattactactaatttgcgctattaaaggcaagctgatataaattagaactcttctgaatgggccttctatatttaaatgggctttttctaggaagtgtatatttgtaaacttgtcttgaatggaaaaaaagaaaatacttgtagatttgaatgaaccacctgagaagatctcattgtagtctgtcataaatcaatttctctgaatcatctgctatatattagcaagataagatctgctttcttagtgttcgaatacagtactatgctccagagaaaaagaaattgctggctggggaataagtaattaaagccagtgacaaaactttctaaaactcagtggattaatttcattctaaaacttctgaggttgttaccagcacggcactctctcattccaaagagaaaaaaatgatatcttaattgagaagttctttctaggctatcttaactgccttttctgagcacagcgtttatcacgggcagatgtgtgatttttgtcttgtttggaaattcaggtttcattttctcaagtgtatgataacagcaagcatcccataggtgtcgttgaatactctggggcttgtctctctgtaaattgcgactctgctgttttccaacttgtcatcttaatggaatgagtttcccatggagagaatctaaattgttatgttcttgacataagcagacagattcttgctctacattccctgacatattgacttgataagtggtggttttacacaagggcccagtcatctcttaggaattaggaaaccattcggggtggaagcagcaatctgtttaaccaccagggggcctctcctctcccagtttcacccagaaaagcaccatttatattttccaaattatctgtattaagataatagaatctaataagtcttacatgtatacatctatcatgttccatcttaaaaagcttatcttccagaattatagataaaaatatatgaataagccataaaaaagaatgaagtgcagatacgtgctacaacatggatgagccttgaaaacattctgttgagtgaaagaagccagacataaaaggacacagattgtatgattccatttctatgaaatagcagaataggcaaatccgtagagatagaacatagattgctggttgctgagggctaaggggagacacaatggggagaaactgctcggtgggttttatctattttttttggagacagggtctcactctgtcacttaggctgagtgcggtggtgcaatcacagctcactgaagcctcaacctccctagctcaagtgatcctcctacctcagcctcctgagtacctgggactataggcatgtgccaccatgcccagctaatatttaaattttttgtaaagatgaggtctcactgtattgcccaggctggtttcgaacccccaggcttaagtgatcctcctgcctcggcctcccaaagtattgggattacaggtgtgagccaccgtgctcaaccaatgggttttattttagactgatggaaatatttgggaactagacaggtggtagttgcacaacattgtgaatgtagtaagcacccctgaattgtttgctttttaaaatggttaattttatgtgaattttgcttcaatctttttttttttttttttttttttctgagacagggtctcactctattgctcaggctggagtgcagtggctcactgcaacctctgcctcctgggcctcagcctcccaagtagttgggactacaagcacacgctaccatacctggctcatttttagtatttttagtagaggtggggtttcaccatcttacccaggctggtcttgaactcctgggctcaaggaatttgcctgcttcagactcccaaaatgctgggattacgggcgtgagccactgcgcccagcccaatgcccacggttcttcttgccagttctgttgcctgggttgccttctcagctgtgatgatcttttccaggttttgtcacatctgtcctaactggattataagtaaactccttaaaggctgagaccaacttgtacttctaaagaacaagagtaggatatttgtgaaagtgtccaagtacgggaaggggtgagtggatgaaacaagacttgccattcattggggttctactctttaccttccagaacagtccaggctctgcagacagcatcccacctgtcccagcaggctgacctgaggagcatcgtggaggagattgaggtgtgaatcttttgccaaatgcatctcccagctcctgtctttgacactctgcagaagaatcttgcagatagccatgcatgatctgttactacaggttacattgcttcttatatccatggcacacttgtgttctttgtattaaggtattgtgtcctgaggaatatttgtgcctattacataataggtcctcaggacgtggtgactgtggtttttattattgctctatccttgcctttgcccagaatatcatgctcctctgggacctctgtcatggactgcctggcaggagtgacaagcagtcctgatggtgttctcactggatgcttcacaggcacgttggttgcctagtcatgttgcctaggagagcagtatgtctctctttgtcttttggagcattaagaaattctgggaaacgctgtgctttgtaggttgtattcaaatggatggccatggactccatctgtgtcatgatgcttcctgggtgcacagcagcctggcccactggctttccacccaaagcagctggcgtgttctgtgccatgactcctgggcttgggcctgcatacaaggggccaaggaaggagccctcccaaaactgcagaagatagtgctctcctcaaatgtctgtttgatatactttactctgcctaagcaccatttttgagaaagtatgaagtgactgagatggtcttcagatttagagtgagagatgtcacgaagctgtctgcagtggggttgacagtggttcgtgcatctcatttctgctgttacttgacatccagcatatttctgttttgttatggcaggaccttgttgctcgcctggatgaactcgggggcgtgtatctccagtttgaagaaggactggaaacaacagcgttatttgtggctgccacctacaagctcatggatcatgtggggactgagccatccattaaggaggtacctatctaacaattttcaggcatgaaacccaaaggggtcatcagctgtatctgctaaggatggcttttatcagagaggaatgttcagacagtaccttgggatgctgtcactcagtgtcctgggttagggattaagaatgagaaatagaaagatgtaatgcctgtcttcaggaaatgggttgctagtgaggtagacgtgtaaacaaaccatgcttgctttaaatggggtatgtacatgtcacgaggtagtatcaaggaagccacgtgtattactcctgtttcatctccctttcttcccagtacccttttctgcttgtcgcctgaatgctttccactctggtggctcattcagatccttctctgggctcacaattgcttctcctcccttcccccttatgctcagcaacggctaaatcttagctaatctttgctgatggacatagttcactgagaggcatgtgtgtctatcacacatccgccaagagttcattctttttctcaagaggaggttgttaacctgaaagaatctttagttggaatgcatgtgggaagcctttttgagtaggaccgtctttgtaccccttgtttgtgagaagttaccagcccttaatctaaagtacttaaaatacaagctgcttttatttaaattttaggaggagagatttgggttttaagtgagaattttcatttctttatgcattatgagttttgtgccaagtttctttaagtaaatagttatctgtcttggataattggaattaatttcatattttctccatgtggtcaaataagttattcatgtgtttgcattctttttgtgtctcttcctttgtcctaagtgtaggaggtctagaaatatactcccttttaatttctgttatgggtgaaattgcaagagtgtggggtcttagggtacagattgtttgctgattgtcctatacacagtaaagtagatgaattaatgatattgtacttatacaacttaaacattttcttcctttatttccaagctgctgctaaccaggtacttggctggagtaatttcgctgtcactgcttttgacaaaacaattctggtgaacagtcacccattttaacgtgtcaacagagtagtgatggaaaattgtaattggtccaattaaagaaaattctttcatgttgactgtgaataacactgtcaggaacaagagagcccttttgttggatggtagattttaaaaaacaaaactgattgaaggggaaaatgtttcctcctaagcaaataacctccagaattttaataatgccttttaggttccacttttttaaaaaattgcttttagttttctcctctaagcagcccattagttcttaatggagagttattttagtttctttttaatgtacattttagctataaagtttggtcttataaataaaaactttgcctcaatgtactacttacaagtaggttgggaggaaaggtagcttagctgggaggataatgagaatcaggaaagaacagattttcttgtagaaggactttggagacaaacagtcctacatttgaatgttggtcttgctaatgttgtggtaacttgcagaagttatttagcctcctttagcctcagtttcattttttgggaaacattgataatagcaatcttttatagtttttgtcaaaatttgagttaatgcatgtaaagcacctatcatgatgcctggcatatatagacattaacaaataattactattatatatatttcataatatagtttcatatctcagtagttatctggaagtaccctgcatttgtgtagtaagcattattatgatttttttttcagacagagtctttctctgtcgcccaggttggagtgcagtggcgcgatcttggctcactgcaacctccacctcctgggttcaagcaattctcgtgcctcagcctcttgagtagatgggattacaggcgcatgccaccatgcctgactaatttttgtatttttagtagagttggggtttttctctatgttagtcaggctggtctcgaactcctgacctcaagggatctacctgccttggtctccaaaagtgctgggattacaggcgtgagccactgcacctggcctgtataataagcacttattaaataactgacaaatcatgaatttcagtttataaaggaagatggaaaaaaaaacaaccacatccaagttctaagtttaaatgcagaatatttgcgttttctccatctacgaatttggatcattgaccaaaagacctcccatgtgaacacccgaaacagataagggtgactttcctctacagcagtggccctcccaccttcccagcagaggaagagaaacagctgcatttcgcatttctttcaggatcaggtcatccagctgatgaacgcgatcttcagcaagaagaactttgagtccctctccgaagccttcagcgtggcctctgcagctgctgtgctctcgcataatcgctaccacgtgccagttgtggttgtgcctgagggctctgcttccgacactcatgaacaggctatcttgcgggtaagacatccatgcccaaagtgtgcccctctgattatcattcctagtggaaggctttcagaaatctggactatggtcacagccaattacagcccctacaaggacatacccattaaatggagggcaaggctcatttccctgagccttgaaatggagacatgaccactcggtgaactagccacagaacccttcaaatctattaaaaaaatttttttcccctcgtggatttttaatttttgtttctttttttgagacagagtcttgctctgtcacccaggctggaaagcagtggcatgattttggttcactgctgcatccacctcctgggttcaagtgattcttgtgcctcagtctcccaagtagctgggatcacaggcgcacaccaccatgcctagctaatttttgcatttttagtagagatggggttttgccatgttggccaggctggtgttgaactcctagcctcccaaagtgctgagattacaggtatgagccactgtgcctggcctctccctagaggattttaaatagtacaggcttggctgggtactgtggctcacgcctgtaatcccagcactttgggagactgaagcaggcggatcatgaggtgaagagattgagaccatcctggccaacatggtgaaaccccatctctactaagaatacaaaaattagcagggcctggtggtgcgcacctgtagtcccagctactcaggaggctgaggcaggagaatcgcttgaacctgggaggcagaggttgcagtgagccgagactgcaccactgcactccaacctggtgacagagtgagaccctgtctaaaaaaaaaaaaaaaaaaatacaggctttcagtaagtgcaggaatattgcatttctaggtctataactccagatgtatagagaagtcttgcatctaaaatgcacttcccaataccaaactttctttttcatatttttttggttttgttttggttttttttgagacgcggtctcgctatgtcgcgcaggctggagtgccgtggtgcgatcatggcccactgcagcgtaggcttcctccagtacccaaattttctaaatatgttattttacgacagctgttttaattctcaattaattctggtgtttatggttgatcagttctctttttccctggtccttgatgggatatctttttgcctctttatagcacagtcctccctttcactcagcagtaagcatagacttctcctttgtgttaactcgttgaacagagcacatgcacagatcttgaatatgcttagaacttttatctcaaatgaggcgttttgttgctgttgtttggaaccagtgataagctaagatcttcatgagaaattagcattttattaatgtctaagtgttgggtttccacttaggacagttctgtctgtcccattagttctactttggtggcccctgcagatatcctcctgagcgagtaccctgttcttcaaaattgcccattttctccctacatacaactcatataccctcaacaaagacttgggtagaaagtaacctgagtaacatggtttcctgtgagtcaagaggggctaagagaacaaagtggaaaaagaattgactctgaagttaaatagatggtttgagtcctggctcaactgcttaactggccatgtgacctttagcagtcccttaacctcttgtggcttgtttcttcacctgtgcaataaggattattctatctgtgtcgtacaattgataggagaatgtatgtaaagggcctagcctggtatatgcatatagttgactttcaacaaatgatagttattaatattatccatatttctttaattttcccattgctgataccattctaaagtatttttctggctgatttatttattaattttttagtagagacggggtctcactgtattgcccaggctggtcccaaactcctggccttaagtgatcctcccatctcggcctcccaaagtactgcaattacaggcatgagccactgcacccagtctagctgagacatttttttttttctttttcagagacagggtttccctctgttttccaggctggagtatagtggcgcaatcatagctcatgctaactcttgggctcaagcagtcctcctgcctcaacttcctgagtatctgggactacaagcacatgccaccatgcccagctaattttttaatttaaaaaactttttttttttttggtagaaacgaggtcttgccatgttgcccacgctgttcttgaactctttggcatcaagtgatcctcctgactcagcctcccaaagcactgcaattataggcatgagccatcatgcccagtctgataaattcttttaaagattctgtagtagagtggatagaatagggaatcagaaagaaggcaatatattggccaggtgtggtgactcatgcctgtaataattcactttaggattaggcagcaggcccaaggtcagccaagatttcccgaagcaggggatttgctctcctgcagagcttgcaacctatagataaagcaccccagaaacaaaattctctgctcctgtagcctttgttgtaacaaataattttttatttatttccagttgcaagtcaccaatgttctgtctcagcctctgactcaggccactgttaaactagaacatgctaaatctgttgcttccagagccactgtcctccagaagacatccttcacccctgtagggtaagtcctgatcatattttggtggggcgctgacctctttgttttggaaagttagcctgcagccagtgtaacagattaatacattccagttaggtaaatttgatctactggtatcgaaagcctacagtcgaatgtaagaaaatgatttttaaaatgaagattatttggttttactgtttcattctctgtttctagttggctctgtcttgtcattgtgacataagtagctattttgaaatttaatatttattgatttttttctgataaataataatgtttattataggaaaaatacagcaaagcacaaaaaaagaaaatataacttacccataatgctaccattcagagataacttttgctaactttttttttttttttttttgaggcggagttttgctcttgttgcccaggctggagtgcaatggtgcaatctcagctcaccgcaacgtctgcctcctggattctagcgattctcctgcctcaatctcccaagtagctgggattacaggtgcccgccaccacgtccggctaattttttgtatttttagtagagacagggtttccccatgttggccaggctggtttcgaactcctgacctcaggtggtccacctgcctcggcctccctaagtgctgaggttacaggcatgagccactgtgcctggccttgctaacattttataatttttttttgacagtcttttttctatgtatgtaaataaattttaaaaattcagttaagggccaggcatggggctcatacctgtaaccccagcactttaggagactgaggcagatggattgcttgagcctaggagtttgagaccagcctgggcaacatagcaggaccccatctgtaatttttatttatttatctatttattttttgagatggagtcttcctctgtcacccaggctggagtgcagtggtgtgatctcggctcactgcaacctccacctcccggcttcaagcaattctcctgccttagcttcccgagtagctgggattacaggtgtgtgacactacgcctggctaatttttgtatttttggtagaggcagggtttcaccatgttgaccaggctggtcttgaactcctgacctcaagtgatccacccacctcggcctcccaaagtgctgggattacaggcgtgagccattgtgcccggcctttttttaaattagagatgggggccaggtgtggcagctcacgcctgtaatcccagcactttgggggggccaaggtgggcggatcacttgaggtcaggagctcgagaacagcctggccaacatggcgaaaccccatctctactaaaaatacaaaaaaattagccagacgtggtggtgcacgcctgtattcccagctactccggaggctgaggcaagagaatcacttgaacccaggcagcggaggttggcagtgagctgagaacgcgccattgcactccagcctgggcgacagagcgaggctccatctctattaaaaaaaaaaaaaaaaatcagggtatgctttatatgtaacaatgtgccacaaacttttttttataggattaaatattcttttacaatttttttttttcttttttgagatggagttttactcttgttgcccaggctggagtgcagtgtagtggcgtgatgtctgctcattgcaatctccacctcccagcttcaaatgattcttctgccccagcctcctaagtagctgggattacaggcacctgccaccatgcccggctaattttcgtattttcggtagagatggggttttaccatgttggccaggctggtcttgaactgcctcagcctccgagtggctgggattataggcgtgtgacctcaggtgatcctcccacctcagcctccaaagtgctgggattacagttgtaagtcaccatgcctggcctttacaatgatttttaatggctgcatattattgctatgtaattttttaaaaactaaggcccagtttactgggtgtgtggcttgcctatagttccagctacttgggaggctgaggtgggaggatcgcttgaggctgggaggtctaggctgtagtgagccatgatcataccatatcactccagcctgggtgacagagggagactctgtctcaaaaacaaaaacaaaaaactaagggtcaagctgggcacagtagcaggtacctgtagtccagctacttggaggttgaggcaggaagatcatttgaaccgaggagcttaagaccagtctgggcaacatagtaagacctgtttctaaaagaaaaaaattaagggtcaatttttatatgaattagtgtttttcccagctaattgtatagaatttttttttttttttgagacagtttcgctctgttgcctgggctggaatgcagtggcgtgatcttggttcactgcaacttctgcttcccaggtacaaggaattctgcctcagcttcctaagtagctgggattacaggcacccgccaccatgcccagctaattttttttgtatttttagtaggaatggggtttcaccatgttggccaggctggtttcgaactcctgacctaaagtgacccgcctgccttggcctccgaaagggccaggattacaggtgtgagccactggccttatatggaactttttgaagtgttaaattaggtaataagttattgagatcaggagttttcaattttagagagaaaatgcgtttcttaatcataaggatacataggcaatatgtgaaattaaaaagcaaaatcatttttaggcgtgtcaatggagtggtaaaagacattgagattttactatatagttagagtaaggaattctctacctttttttccctttaaaataaaaataaatatttttaataaaagtaagatatgtcctttttgagaaattcacaaaacacggaaaggtagaaatcataccaaaaaattagccacaattatactatcgtacaccaacctctttgtacattttggagtattttcctctacatttttgttgtcattgtgaaacatatgtgggatcacattgtaaacttctcaattttacattacactgtggaaagctaccaggagtttgaattttaggagtggtgggagtaacaaaggaaaagaaaacgttggaaacctaggggtgttcatcttagatacttttctccacatgccaatctgtgattaagcacgagggtcaggcatggtgactcatgccccagcctgcactttgggaggctgaggcaggtggatcacttgatctcaggaccctgtctctacaaaaaactgcaaaattatctggacgtgatggtgcatgcctgctgtcccaactaccagggaggctgaggtgggaggatcagttgagcctacgagttttgagactgtggtgagctgtgatcgtgccactatactccagcctgggtgacagtgagaacctgtctcaaaataaaaaaaaaataagaagcacgagattgcccaagtggggtgggaagtcaaaaaggtaaggagttggctagccttggacagtctccaggagacattttgtagctcctgtttgttatatccatgactttcctacctgagttcttgctaagcccattgtcattcttaacagggatgtttttgaactaaatttcatgaacgtcaaattttccagtggttattatgacttccttgtcgaagttgaaggtgacaaccggtatattgcaaataccgtagaggtaggtgtttttctttccttcccattgccatgttagtatatccaaggatatggccaaattgacacagtattaattgtctggtgcattgacttttctctacaaccaagctaatgtgtttatgtggagggagggctgcattcagtctttgctgtttgacagacttagtagctaaggcagtaaatcaagaacttggtcatagtgaattttcttttatttgtaagtttttcattttccattataatttagcattactgtcttacatgaaatttagttagtagaaaaaataaaaatcacccataattccactgagccttaaactcttaaagtgttttgtgtgataggctttggtgggtttagaaaagtgcttgatgccaaataggtgacaaaaagcaccaagtgacacatacgtaacactataatgaagctatttgggtaaaggataaaagaaaatcagtaatctttcataatgaactttgttgatgtttagctaactctagctgggttgaagatcgaagtagctttaaggatagaaagccttatttacctgatgctttgtgggaaagaggtagttcaccttagtatttttcccagctaattgaaatttaccccatctggcatggtggctttcattgtaatctttttagatagaagtttatttaagatgagtgacacattttcctactttcttacttccaatttaagatggtttctttgtctttcatgaccttgacacttgaagaggatgggctctcaatctgtagaatgtctctccgtttgtgtttgtctgatgtttcttcatgatcaggttcaggtcatgcattttccgcagttctatcccaaaagtaatgctctgccctactcagaacaagaagtatatgatgtcgatatgtcttattacaggtcatgttaaccttgatcacttgagtaaggtgattgtgtgctaggtttctctgctgtaaagttgctgtttttctgcttgtatttaagtgtcttgtggggtggtactttgagactctgtaagtatcctaatgatgttgtctgtaatagttattactgtggtgtttgccaaagggtgattttctctttcattccttctacattttaaaaattggaattctgctgtaagaaaataactgtgttttataccattttatttataactatcataattctttatcataacatgtttataatgtaatatattttctataattcatatgtttacaataattgcatcatggacatttattttactatatacattgtggtccatgactcatttatcttgttgctcattttatcctaggtttggcctttggagagctcctcaaattggctcctgtgacacttgctttcttttaatgacagaattaatagctagaaagtttgaccttttcaaaaatgcggcattacttcccataggtagattcaacacttgcatttaaagtttggcagaaaggaagatgttttctggaactcgaatctcttcacctcatgtgttgacctttttagcatgagacatctgatcttagttcgttcactatggatagaagctattgtagcgtatgccttgatcctttcaaatccacattcttataatgttagtttcctatgttaagaggacttatttgcaactgaacatattaaaaggaaagttctttttttcttttctttttttttcttgaaacctcttcttccctgtacttcgagtccatcttaaatgccaggcttatacctcacagttcttaaccccttcctttcttttcacttctaccttctagtcagttaccaagtcctattgattccacctctgattgtcttttccatgagtcttttgctgttacagtcaccaaattgctctattctccatattcgtaccaatatttggtatttttaggttttagtaatctgatgcatatgaaaaggtatcttgttttaatgtctttccttggttactggtaaagttaaacatctttttatatatttattagccaattacatttcctttccagtgaattgttttatatctttgcctggttttcttttggtttgttagtcttattactgatttttaggagtgatatatgtttagttgtgagcatcagatatcttcccctagaattgctttatggcatctcttgaagcacaaaatttaattttaatgaagcctaatttaaatgtcttttcctagggccaggtgaggtggctcacacctgtaatcccagcactttgggaggccaaggcaggcggatcacctgaggtcaggagttcaatactagcctggccaacatgatgaaaccccatctctactaaaaacacaaaaagtagccaggcgtggtggcacgtgcctgtaatcccagctactcgggaggctgaagcaggagaatcgcttgaacctgggaggtggaggttgcagtgagctgagatcgtgccaccgcactccagcctgggcaatggagccagactctgtctcaaaaaaataaataaataaataaaatacaagtttttttgctagactgtgttttttatatcttctttaaaacaatcctgtgctaccccaaagtcaaaaagatattctccaatgttttctttttttatttttatttttgtttttgagacagagtctcgctctgtcactcaggctggagtatagtggtgccatcttggctcactgcagcctctgcctccggggttcaagcgattctcctgcctcagcctcccgagtagctgggactacaggtgcatgccaccacacctggctaatttttgcatttttagtagatacagggttttgctatattagccaggctggtctccaacttttggcctcaaatgatccgcctgctttggcccaccgacgtgttgggattacagtcgtgagccactgcacctggccctccagtgtcttttgaacatttttaaagttgttttcccccttatatttaaggcttcggtctatctgaagttcatttttgttgctgtagtattttacacccttttctataattgtacttattgcattatattaccattgtttgtttatatgcattgctttttctttttctttttctttctttttttttgagacaaggtctcattctaccacccaggctggagtgcagtggcgtgatcatggctcactacagccttgaccttctgggctcaggtgatcctcccacctcaacctctcaggtagctgggactacaggcatgcaccaccatgcccagctaatttttgtatttttttctagagactgggttttgccatgttgcccaggctgctctcgaactcctgggctcaagcgatctgcccacctttgcctcccaaagtagtgggattataggcgtgaaccaccacctgcattgctttttcactgggctgagaactcctatgggtgaaaactaaatattattattattattattattattattcttttttttttgaaacagagtctcgctctgtcaccaggctggaatgcagtggcgcaatcccggctcactggaacctccgcctcctgggttcaagtgattttcctgcctcagcctcccgagtagctggggctacaggcacgcgccaccatgcccagctaatttttgtatatttagtagagacggggtttcactatgttggccaggatggtcttgatctcttgaccttgtgatccgcctgcctcggcctcccaaaatgctgggattacaggcgtgagccaccatgcccggcctaaatcttattttttcagtgcttggtttccatttaacattacttagaggaagaaaaggatagagtggtctaaagatgtttttccacattgcaggcccttcagaactctggcaattcatcttccagacttagcttttttttttcttttttctttttttgagatggaatcttgctgtcacccaggctggagtgcagtggcacgatcttggcttactgcaacctccgcctccacctcccgggttcaagtgattctcctgcctcagccttctgagtagctgagattacaggtacacgccaccatgcctggctaatttttttgtatttttagtagagacggggttttgccttgttggccaggctggtctcaaactcctgaccctcaggtgatctgcctcgcctcggcctcccaaagtgctgggattacagatgtgaaccactaggcccggccaagagttagcttttatttattgatttaataacagctttattgaggtataattctcataccataaagtttaccaattaaaagtatgtaattcaggctgggcatgagccaccacgcttgtaatcccagaactttgggaggctgaggtgggaggatcgcttgagcccaggagttagagacaagcttgggcaacacagggagatcccatctctaccaaaaatttaaaaataaattagccatgtatggtggcatgtacctgtcccagctacttaagaggctgaggcaagcggatcccttgagcccaggagtttgaggctgcagtgaactatgatcacactactgcactctagcctgggcaacagagtgagaccttgtctcaaaaaaacaaaaagcctgggcgcagtggctcacacctataatcccagcactttgggaggccgaggtaggtggatcgcctgagatcaggagttcgagaccagcctggtcagcatggggaaaccccgtctctgctaaaaaaaaaaacaaaaaaaacaaaactatgcaatccagtgtttttagtattttcacagacttgtgcaacccttgccacaatgccattccagaatatatttatcaccctggagagcaatgctatatcttttagtgggcactcctcattctctcttcctactttctgctttctgtctctgtggttgcctatttgggacattttgtgtaaatgaaatcatacaataggttaccttttgtgtctggcttttttgttttttcacttaacataatacttctaaggttcatccatgttgtagcatgtattagtactttatttctttttatggcaaaataatattccattgtatggatatatcacattttgtttaccgacttatcagttaatgacatttgaggtatttctcttttttggctcttatgagtaatgctgctgtgaacatttgtatataactttttgtttgaacacttgtttttggttctttcaggtatatgcttaggaatagaattcctgcgtcatatggtaactcggtgtttcacttttcaagaaactaacaagttttcaaagcagctgcaccattttacatttctaccagcaatgtgtgagggttccaattttactacatcctcaccaacacttgttattatctgactttttgattttcgccatcgtagtgggtataaagtggtgtctcattatggttttgatttccatttctctgataggtaataatgttgagtatctctttatgtgcttattggtctcttgcatatcttctttagaagaatgtctattcaaatccattgtccattgaaaaaaatgtttttggtctttttttcttccttctacaatctatacacctcttatttccttttatttatctttttatattattgagttgtaagggtttctctggttagaggttccttattaaatacatgatttgcaaatattttctcacagtctgaaggttgtattttcactttcatgatgttgtcttttgaggcacaaaaaatcttaattttgatgaagtccagttttaaaatgttttgttgttgttgtttgtgctttaggtgtcatgtctaagatgccattatgtaatccaaggttaagaagatttactactatgttttcttaaaagaattttatacttttggctcctacccttaggtttctgattcattgtgagttaatttttgtgtatggtgtgatgtagggggtccagtcttcttttgcagttgtcctagacccatttgttgaaaaggctgttctttccctaacgaattgccttggcacatacatccttgtaggaatcacttgacaataaatgtaagggttgatttctggactcataattctatttcattaatctgtattgtccttatgccagtgccacgctgtcttgattactgtaacagcttggcattttgtaacatcaaatctggtgtttgtccaagtgtttctgtgattgttggaaaaattatctaagtacaaaatagcagaaatggctaatagctcttgttcatgcaatgataataagcccccattgaggccatttactctccttttcctccctagtgatggagtaagcattacaaaatcttctctcttcctccttattacattagaggtgtgtgtgtttgtgtgtgtgtgtgtgtgtgtgagtgtgagagagagagagagtcggctttgacctttgccgtatatgcaacttttctttgtaatttcagtaataatcacacttagagcctcagagcaggtcattgggtcctgtttgtcctcccaagaaatgctcgacattggtcagagtgcattaacggtggtttggtgtggaagtcctgtaatagccctcattgacattggactggctgtcaggggaagcatcggttttggacgctctcattagcattaattgcccctaatgcaccatcatttttgacagtaataagctaaacaggggtgttattactcccagcagaaagactgcatttcctggcgttaaaacattttttgagatgtatatggcatgtggtgcaggcaaagaaaggaatagcatgatccagtgtaaagcaggcttagctgcatttaaagtggagaaataagtccctttcctattataaaaacgaatcctgcattgttagttggaaggaagaagcagctaatcaacagggatcctacactgaactctttaaaagagggctttggaaaaagttacgatttttatttctaaatttgctttaaaagagtagcataaaaatgctttgcttttgagtgtttccagagacccatttatagtgagattttaggagcagaaggatttgttttaaactgttccctatttaggaacagccctacgggtgtttatgtgcaacaatgaaagctgtaacttaggaaaccttttaaaattggggctgagagcaaaccaagaatgatgcaagttcactgcagtttgccctttgctcactccatgtatctgcattgtctggggatgctcaggatgtctttagaacacacacgaagctggatcctgattagctggccttggtggccagttagtgctgagagtttacagccaggattctaagtgaaaacctaaaagctgatagcttccttatcactatcattaggagacactgaagactttacacaattcttttttttttttttttttgaggcggagccttgccctattgcccaggctggagtgcagtggcatgatcttggctcactgcaacctctgcctcctgggttcaagccattttcctgtctcagcctcctgagtagctgggactacaggcgtgcatcaccatgtctggctaatttttttgtatttttagtagagacagggttttgccatgttggtcatgctggtctcaaactcctgacctcaaatggtcctcctgcctcggcctcccaaagtgttgggattacaggcgtgagccaccacgcccggcctagtctgttctttttaattgctccatagtaattaataatatgcatgtatctttctttatttagctagtcttctgtttatggacatttcagtaggatgatgatttcaagatcacatttacagattaaatgaatgagttcttaagagaatgagttagagaaatagggaattacctagttaatcttgatgaagattgcagagtagttaactctgaagacagattatttttatagcatggagtattattgctaatcctcctacctctcccaaaattggagggctgctaagcccatcaagcctcctcctcagtcttcttgctatggaatgtttcctactccccatttggggccacccatgggcagacttgggtcacagttccttctgtgctttcataacactttgtacatccattaaagcagcaacctggtttattataattatggtttgtgtacgggacaggaaggatttcttgccatctctgtatattccctgaatggggaaagtgctctcagcaggtgtcaaatcaaagctctgtggctacttctttgcctgagccttccattccagtttgttttccagtggaaatgatgtcagtacttgtcgggttgtgttttttgcaagaaagcttgctctggttctgagccttgcgtgagttgtaacgctgttaactcagcagagagcccaaagagccaaagtgaggctcctagctcccttcttgggggtgtctattcaacctgatgggccatcgtccctcctcctccactgccataatttcacccagttgcctagactcaatgacaggcaatgatcctaaatatagttctgctatgaattcataggtggctgtgaattcaaaagtagatggtaatatccttacagcttctggtaataaacctttacagtttttttttttaaagcaaaacaacacccctattcaacatgataattgaggctgttgtcataaaatagttattacagaggcaggaaagaaggccgttagaaggaattacttgataggtatctttatttttaatttttcttctttgcccttgatttgaggttgtcacacctcgatatggtatttcagaaaactgccagagctatccttcaattatttgcccagcccgttatctctattccttgatcctgacttagactataaaccagtggatttggcaaggatttccttaagtgttacattcaaacctatcaaatatttggaaggcttacagatctgtttgcacataaaagcgccttgggtttgcataatttgcacattcaaacttgggttttaattcagaaatttaacatgttttctgtctcttttggatatttacattgattttaatctaattttaaaatttctcatttattggcattagcccctctttgtgaagatgtttaagggacatacagaattcaaacactttaagagtcaacatggattggtttgtgcttataacaaactcccaatctcagtggcttaaaacaatgagggtttattttttccccacgctagattctttaggtggtcaactggaggctctgcttcatgatatctttgctccaggaccctggctgaaggagcaagcatctggacattgtgtccatgtcagaggaaaagagagaatcacacattgattcttaaagctttcacttctgcccacatttcattggccagagcaaatcatgtggccacacttgactccatgggggcagggaagtagaattctaccacatgctcagaaggagaatgagaagtacttgggcaacagtacagataactaccatgactgtctaacaaggagctgaagtgcatggattctgagtcagagtgcctgagcttgacactggcctgatcacttcctcacagtctgattttgagcaaagcagcttcatctctctcatcttttatttccttatctgaaaagcagtaccttacagaattgtgaggattaaatgagatagtctttacaaagccagtgcctttcacatggtaagcactcaataaatcctagctatcattagaacccaattcttgctgatttgaatgaaaggtactgcttaaggatttttccccttatttattttaaaggacacatgaaaagatttactttttttcttttcctttttcttcttctttttttttttttgatgtttaccatccatccaaagccagaaaaagacattttaggcctcggaatgggagaggttggaaatattactgggctgggtcagtgttattatcatccttgaagactcttgttctaggattttttcatgcctttactcaccttaaagaatagaaaactttatatctgcatgtgaattcctgaacacccaccaattgacctggcaactgtcttctctattttcctctagctcagagtcaagatctccactgaagttggcatcacaaatgttgatctttccaccgtggataaggatcagagcattgcacccaaaactacccggtaggtgagatgccacctgatcactcagggagctgaggctcaagagctgagaggagtatgcctaggcactgagccctgcaggcatcagttctgtgtcagcagccatccagcttacatcctaaattaaagagtctgtagttccactggtcctgcaccggggattctgcgaattatctaagtggatttggagattgtatataccagtgtttagtccatgcacaaactatttattaaccagtcctcaacgaggtaaagcgcttacctcaggatgttagtctgagtcagtcagctatgtcactaagcatattatttagttcagatgataatttttaaaataataagaccttctcaatgaaggaagcaaggtattaatttacattctggtgcgatctccttatcatcacagtcctgaatttgcttttagtgacctaatggcaagtctctctggcctatgatgggtctgaaattagttggaagcctcacacgtgcttaaaattgagatggcagatacccagcactagggctgccatttccccctcccaagtccatggaggcagtactaagaagtcatagaacatttgctcccactgaactcagacacagcctcagaatctttttttgaaacataatcttctaagtagacactaacaattgaacagagttgggccagaatgctgtaagaagcctgctcatcagccctcccccagatccttattggctcagcggggatctagatttctggggtatagtccagaccccaactttactcaactagggtagctatagaggccagaagacagtagggtgaaccatcaaggctctttgaagatgggatgttagccagaggctggaagccaagcagctactccttttaaatcacatagagttggcctttgtgtctctgggttggctatttttgtagtgatattggagataagagcactgtttaagaatccactgaagaaatgtctgtgcgagcgctttgctgtttaattctctgcctagatgaagagttggtcttacttacgagtaaatgtaaaatgtgagtataaaataaagccaggtctgagctctgtaaccatttggctggtttatcccctggccatcttaccctaaaatcccaggagatagctgtgaaaagaagttttcctcatcaagtctgccttttgggaaaatgactttttaaaacccagtttcagggcagaaaactaaattgaaacagtgtccaggaaaaaaatatagcattaaaaaaagacaaagctgaaagtacccttctttcttttgtgtctcctacctgccttgtctcgattttgctcacgtgtgctgctggcatcaatcctgtaattatttctccttgcggttctgccagcccggctctcctgtgtgcctgcagaggccacacgtgagctcctctggtgcctgactttgttggagttgagagccttaggtccttgaagtgaaagcccagaggtacaagcatctgtacacagcatttccccagatcctgctggaagtttattctgcacttttctcagtccaggctttatcagtccaatttgcccccaggttgcagacagttctccacatctgtctgtccacaacagaagtgttactatgggagagggtggttgaggcaatgaagtgaagtatatattttctgcctgttctcagagatatactgatcctctctgaagactaactctatatgcctctttcagggtgacatacccagccaaagccaagggcacattcatcgcagacagccaccagaacttcgccttgttcttccagctggtagatgtgaacactggtgctgaactcactcctcaccaggtcaggaagacacctagacagttctcttaacctgaaatgtgaatggatactagagtttacaatgtggtctataacatggactagagagaattccacgttcctgctttcaggttttgaccgaaccctgacagtccatcaggttctcccacatgacactctcacccttctactggttgtagtcctttacctgggatacacccttctttctaaaaagttagctggtattgaggagaggtacttaaggcagatttgcacttaattaaggtcattccttcctccctccctccctcagatggactcttgctctgtcacccaggatggagtgcagtggtgtgatctcagctcactgcaacctctgcctcctaggttcaagcgattctcctacctcagcctcccaagtagctgggatacaggcatgcattaccatgcccagctaatttttgtatttttagcagagacagggtttcaccatgttggccaggctgttctcatctcctgacctcaggtgatccgcctgcctcagcctcccaaagtggtgggattataagcatggcactagactcgaggctttttctttctgatttaaaaaagggaatgtgctggccaggcatggtggctcacgcctgtaatcccaacactttggaggcagaggtaggaggatcacttgagcccaggagttggagaccagcttgggcaatatggtgagacctcatttgtgtgtatgtatgtatgtataaataaataagggaatatactgaaataatttcaaaagaagacccaaagcatttttttattctagccaaagcagattttgtatttgtgggactctgaagaatagcccttttaacttgtgcttactttgtattatgaaagcaataggctttatttttttcatagagtaatgaaaattattatttaaaagattttcaaaccatatactctttcccctgagaacctaatatggccccatgtccactcagatacccccactcccacactgcctgtcatcccccttgatggagaataacctgcctttagtgttacgtgaaggaagattcagataaatactttgaatgctgaaagacaggaatgcgggacctagtttggtatggggtaccctgtaccgatgctttagcaaggaccagcagacttgttgccttgaggcagcttcagggcagacctcagaggcaactggatttacttgagaaccttcttgctttctgtttcttgcagctgcagctgttggacttgtgccccaggagcacgttcctctatggccacagtcctgggagtcctctgctcctctctcctccctactcccaaactccagacagcttggttagggcccttagccaagcctaactgacctttgagtacttcagcctcttagcatttcccagcttcttcccagaatgacatttgccaaccaaatagcacaagggaaggaagagtacaaagagaagaaagtaaaagactaaactagtaggattaggattagagcaaggagagttagtgaggaagtgtaactttcactgaatacttgtctcatccagaattctgctgtagaatcatggcctagagaccttccaggtggaggtggcattttggtgatgaacttggcagctgcctgcacttgattgtgataggaaggagatctggcatccggtctccccattccattcctggccaagactaattgctgtagttgggatgcttcatatctctgggcctctttccctaaatgctttggtggtggttctttgttgttcaggtatagattaacacatgagatgtagattttctgtagatacagtgctggctctgtcaccctgccaactcatttaatgcttgtgccttgtgatctgtaaattggatctgtaaacctacctgccttgttgaattctttattttgaaacacctgaaagaaaagctctgggtagttatcaagttttggtccagttctaatgtgcagacaccttggtttcttgtgccattagtggggataaagtgattagactcagtaccatcgtattgctattaactactatttgttgactagctagcatataccgttccctgcactaatgcttagcatatggtattgcaaatcttcacacagatatgccacatctggaagttaatttttctgccttaaagttgaagaaatcaaagcacaaggaagttaagtaacttgctcagctaataagtagtggaagcaaatctgtcttccaagccgaggctctctccatgacactgggctgctctgcttgattagaactctgccttaccatcaatacccaagcctcctctactaaatctttagctggaggcacaaggaaattgaaaatgggcctcttacagttccacctcatttcctttcttttcaccctctggtgaagcagttaattgggcagcaaagtgaccaaaaggctggcgggaaaaagaaattgcagcaatagcaaagggcttaaatcatctgcaaactgggcagtcagcctccaactagtcgagaattggctggacccgtaagttaaatttccttccttgtaccagcaaaaagttatctctgagctgggaactagggtggcatggccactccttctactctctggggcaggtctggcagatcccagagctctcactgtgacaaagcgctaataaccgtctgctgcccggtggattcaatgttaggcccagggagaatcttgaaattatcagatgaaagattgtattattcttccatctagacatttgtccgactccataaccagaagactggccaggaagtggtgtttgttgccgagccagacaacaagaacgtgtacaagtttgaactggatacctctgaaagaaagattgaatttgactctgcctctggcacctacactctctacttaatcattggagatgccactttgaagaacccaatcctctggaatgtggtatgtgcctgaatgtaccccgacccaggtgagagtggctgtgccccaggcactggtggctctttttcaggggcatggggctcttcaccttcgccttgcctgtgcctcctataaataagcttgggaggtgaggcactgtgtgcagtctccataaatagtcctggggtcatgcacggggcttggcaacatggtacgtgcttaataaatattaagtgagtgaaggaagtataaactttgtgagtgctagtatctgtgaatttctataaacattatacaggaaggccgttttcatattatagcaggcactattggggttacgtagatgtgaaagttaaggccctggcctttgagatatggcatagctcatgggagggatgagatctgaattctgataacaattcaggatgatgtagaaaagtgaattgtacaatgtgcaaaatgctaattaactaataaccaacatttgtgtagcatgttgttgtttacatagtgccttcctgcatgcctcactttggattggcgtgatgagagtaaacgtcttgcaagacagggcatttgagcaaggggttgaagaatggcaagggtttatcagatctggggctgtggggtgatcattggggaagggcttgcagaagagctcaaggtgctttcagtgcaatgggagcggttgtgttttgccagagcacctgaatcctgtcaaaagcaggaggtgatgagcttggaaaggtagcagaggccaaattgcaggctttgaatggtggttgactcactttgcaagacaaaggggcagctgcgttttctcgtgtggtattcaagacttcttttcttctcctggacttcaggctgtttttgtacaagagcgcatactcatttctttctctctttttcaaatgtgactaaatcacacttcccagggacaccaagctgtttctgattgcaactgtaacagcctgtgtaccagctgggatttttgtattaagcagctctatggggctactataccagcagaaaattagaagtcttgctctaaaaagcattttcagcaaatacttgttttgttcttaaagtttttactgcctcaatttgtcagctaatggatcagaagtgattgggactgcctggagcttttttcagttatggtcttagatgtgagtcagagaatattatctattgagtttcacccacttctctgcccctgtgcttttacagactgtccttatttttctaggctgatgtggtcatcaagttccctgaggaagaagctccctcgactgtcttgtcccagaaccttttcactccaaaacaggaaattcaggtatatcccaaagggcctatccactaaacgtgggagaagagagggcaacaaagccctggacagtggctctgctccctttaacttgttttgtgatgttttatagtttgatcctcacaccctgtggattaggcagggtaaatggcagccccatccttgaactgagaaaacaggtttaaagagtccggtgactaacccccagaaagcagagagttgaagatgaaatcagaacctgagtctggttttcctgacatccggcaggttcaaccctcagaccacagcttattagctatgagcgcagatggttctagcgtttatcctccctgctcctgtgtaaatcagggctgatggggcgacaggtgggaaaactcacctgggagaacagggctctacttccttaggcaagtccttggataagcaagcctggtcctgtcctgcacgcaggactgttgtgagaatcaaagttgataacagatgagtgaagaaaggctttgaaatgtttctaaagccctttccaaaataaacacaataattgttaaacactttggatactggttaaggaaactgaggtggatccactcagtggactattttgcaatcttgagaaatgatcgtacttggaaacttgcatacgaattaatgttgaagtgtcaaaaacagactacctgctgtcattccactttaaaaaacaagtgctcaaagggtagagtagtaggattgttttcaaaactccttttcatattgatacagcattatttaagaatgtaaaatgcagctaactggtaggtgtaattgtgatgatgaagggtgctggctgaagtaggtggcagcagctgctatagtgttagaaatcctttaatggcagcggcagcaaagaagagcagaggtcaaaatttaggaacaggaggctcaagtggggctgtgtcatcatggagctggtttggctgggcattgacaagcagaaaaggcaggcacaagttgatacgttggaggaaaaatcttttttaaaaagttctatttgcataatgagttacagcttacaaagcataatcaaatgcactatttcatttggtctttagagtatctttacaagcctagcagggtggtcatggccctccccacccccaattttccagctggaaagtgaggtgaagagtgggaaagtgacttcccttctggtcacacagccatacgtttcagtttgggcctaaacggaggtctccagaatcccacaccattgctgcttctgctaggtcacactatctaggtgagcttcgtaaagagaattcatgtagaattgctcaggaaaaaacaaaaaacaaaaaaaaaaccaagaaataccatcagaatgcttgtcgagccttctggtttaactctggaaatcaaagttgggccaggcatggtggctcacgcgaatcttgctttgcagggccaaggagggaggatcacttgaggtcaggagttggagatctagtgagactctgtctctacaaagaatttaaaaattaagctgggtgtggtggcgcgtacctgtagtcccaactactcaggaggctaaggcaggaggatcttttgagcccaggtgtatgaggttacagcaagctatgatggtgctactgcacttcaacctgggtgacacagtgaggtcctgtctctttaaaaaaaagaaaaagaaatgagagcgggaagttcgtttagggcttccttagagccatggctcagggagagagggatgaattatgggtggaaagatctgtagggaggctctgttaccttttaaaaaggtatagtgttaccaccattagccaattaagtggggcagcagcatttgccagggccaccctaggaacccagaaacattgcgagtccagcgtcctgcctcagtcctgtcactcaagccatccatatacctgggcaccctctttggcactagccaaatgccacttgatggattgcattctctggcctctgaatggcagtgagtctttgaagggaataaagggttggccaagcagtgagctggggttaatgtagtctctgtggaagggagacctctgggatcaaaagccagcattgagaagaggcaaaaggccccatgcccacttgttgccaagaggttttagcctctgggcggcatatcctcttcatgactgacattgatgctttggtccccggtatacatggctgcccctactgggaagggcacattcttaagtcttcttggtgtgtctttcggcagcacctgttccgcgagcctgagaagaggccccccaccgtggtgtccaatacattcactgccctgatcctctcgccgttgcttctgctcttcgctctggtgagtggctgtaattagcgtgggcagcatgcgtctggcgccagacccagcagatgcattccttccaaaggaggctgtgttgtctggcctcagtaaagctccagaggggtccagcagctgtgacctgaattgatgctcaagacattttagaatgaccaaaagttcccactgtggaggagtggccaaataaactgccgcattaacaagtgggcatgagaaagtacctaacagccactaagaatgacaaaagtggatggactgtgatgccgtaggagggttcagatgagatctagtgtgaacagagcgagatccgatgctggtagctataaaaaacagcacaaaggctgtggatttcagcactgcttggggcagaaaaccagaaacaacctaaagttcataagatggaataatatgcagcttttcaaagaatggatagatttatatgctgataggacaagattgccaagatgtgttactgagtgaaaaaggcaaggggtagggtagtgtgtttagtatgatcctctgtaaagttttaaaaggtggctgggtgtggtggctcatgcctgtaatcccagcactttgggaggccgaggtgggaggattgcttgaagctcaggtgtttgagatcagcctgggcaacatagcaagaccccatctctactaaaatcagaaaattagaaaaaaaaaaattaatggtgacgtatgcctgtagtcccggctacttgaggagctgaggtgggaagatcacatgagcccaggaagtcaagtctgcagtgagccatgcattctaacctgggtgacagagtgagaccctgtctaaaaaaaaaataaaaataagttttaaaaggcgatatgtgttagtgttggtcatctctgaggagtggacattctggagaatgtagaggaagtaacttttaccttttctccttttcagtaccatttgaatttttttttttagccaattgtgtttttctcttttttcaaattataaacaaacatgaatgcatatcctcaaagctcagagaattttgagaaaacactcattagatcttacttttggaaagttgcctgtgttcctaattgttgcttttaacaaaagaattactgtttaaatctagataaatctagaagccttgctacaggttttcagaaaccagacctagggtatgggcacctgtccttacatttcagtgatgagaatttcaaatgacatggaacccacggcaagagcgtgaatgccaccagctgccggtgggtttatcttaccaattcttagagaacttagtgggggtgtcagttaccttataaatgcagtttctgacctttcagcttcatggtctcacctgttttaaaatagtagggtttgtcatcattaaaaatgatgttcaggtttgagttacacgagcccatttgagagcaggtgctgaatgcctttctaaagaaaaagggaacaagtttccccgagggcttataatagggtggttgtcacttggaagaattgcctgtccttctaggatgcatgaactttgaagccttggggctgttgatgggattagcattggcatggcttgtgttgcttcccttttaagttctaatgcctttttaatttatttctccccatcattcagtggatccggattggtgccaatgtctccaacttcacttttgctcctagcacgattatatttcacctgggacatgctggtaagtgccccaggctgctaattacctgtaacgtcctctgacatttagcctgcccacgcaaaagccctgttaagtagacccacaacctattacctataatgacttaatagcattacatttccctcttcctcctggccttttaggacagttaatacgaagataaacctgtttggtccatcacttagaacagctgtcattatattgggctttgttgtactgtgccactgttggcagaccatttaccctcagttaataaccctgtttatttccagagattactcacttatcgtatctttacattgagcaatcttcctggatgaagagcattaatgcagtttccaaaggttatctttccccacgctatcgatcttcacatttgctgccggctctgtctgtgtagtaatagaaaacagtcctttccacagtcagacatgctatcctgcatcgttctctggagaccttaggacttcaacagcctaaacataacaagacagtaaattcacaaatcacttaagcatttctgaggcttttgatgctattggatcaggggtgccttgcatttcactgtgactttaattttttgttcgttgtttttttttttttgagacagggtcttactctgtcacccaggctggagtgcagtggtgcattcatggctcactgcagccttgacctcccagactcaggtgatcctcccacctcagcctccagagcagctgggactccaggcttgtgtcaccacatttagctagtatttgtattttttgtagagacggggtcttgctgtgttcagagctggtcttgaactcctaggctcaagcagtcttcccgcctttggcctcccagagtgctaggattataggtgtgagccaccacgcctggcctgaccttaatatttttaaaattctttgcctctttcaggagtcactatctgtgcgcccatagtaaacagattctgtaggggtgcatagataagtctcttgaaattctaggcaaatgtctgtatttttctggggaaagagagagttgtgactttgatcagattattatggtgcagtggtccgtgacctcagaagtggttaagagccccgctgtagttcatccgtcatctgtctgggcaaaactgacaggatgacctttctctctggctcagttcctggatatgtatgatagccctctggggtcagaccgagaagaaaacctgaatataaatctgttgagagccgtggcttttcctgccattgtgctttttgtgcacgttttctcatttgattatcatcatagccctgatgagggtgactggggcaggaattatgatcccttttgacaaggtgggagaatctgggctcagagaagttaagtggctggtaagggcagggcctggaccaggccccagggctctccgttcccagctctgagcccttttcactcagccttcttcctgagtcctccttgctcccttcctagtcacagtggcaaattatccttacagtttgtttccccccataaaaaaagaaattattcatttatttatatcctgtttattttttatttttattttttatttttttgagatggagtcttgctctgtctcgcccaggctggagtgcaacggtgcgatcttggctcactgcagcctctgcctcccaggttcaggcgattctcccacctcagcctcccaagtagctgggattataggcctgcgccaccacacctggctaattttatatttttagtagagagagggtttcaccatgttggccagggtggtctcgaatgcctgacctcaagtgatccttctgcctcggcctcccaaagtgctgggattacaggtgtgagctcccgcacccagcctatttatatcctgtgtatttttgttaagaatttgaaaaatgaatgccaagtataacatgacagaggagttttaaacaaaagcagagaaatagttgtaagcaggaacatggcacaggtcgctgaagtccaattgttacccctgtttgtgggtgtgtgtgtgttttgagacgaggtatcactgtcacccaggctgaagtacagtggtgtgatcaagctcactgcatccttgacctcccaggctcaagcgatcttcctacctcagcctcctaagtagctaggactacagacatggaccattacgcctgactaattttttgaattttaatagacacgaggtctcactgtgttgcccagggtggtctcgaactcctgagcaatcctcctgcctcagcctcccaaaatgttgggattacaggtgtgagccactgtgcctggccacacacttggccacagctgagaggcgaatatattgagttagctactttttggcatcagagcaaaggaataaaacaagctggtataggagtacagaccttttcatgatccaacagttgctatgtctaactttcctcaaccgcagggcatcattatgtttcatttaattggatgtcatgacacctcttcttgcagctatgctgggactcatgtatgtctactggactcagctcaacatgttccagaccttgaagtacctggccatcctgggcagtgtgacgtttctggctggcaatcggatgctggcccagcaggcagtcaagaggtaaggccagacatgagccagggatctagagtagggttagaaatactcagctctgccggcctagctctttgaagggtaggtggcaaaatgatttgtgttcttaggggcaagtctgacaccctaatctagcccagtacagaagccagaagcactttgaagtcagaaaagagccttagtggtcagctttgaatgtattacaaccattgtaattgatgccccaatacaatagaatgagagaggaaaattattagctttatgaagatgaaaatgcattcatagatgtggcagaagattaatttgttagctgtgtaaaaattctctgctgctacagagaatcctgccctgccctccccaccctcaacatgtccccgagagctgctcctctgtaaccctcacagctccaggagcttgtcccggaagcacgaggtctgtgttatttcccacagaagctgcagcaggttttgcagaggctcccagcaaggagtatctcctcagtagcctacaccatctccccgggacccagacaaccttagagtcacatggatggtcagacagaccttgacatgagggcagcttgctggcagcttgactttctaaacagaattggaggcaaatttaaatgtcacaaaggtgtttctcattgatttgactttattagaacctgagtgatttcagacacgcaaaggccagtaagaacagaattgctttcacctctggaaatcgttttcagatgtgccgctttcttctatccaggacgtttgctggaagaatgtaactcaatagtgtaccctcaacgtggctgccagttagggtgctgggatcagagagaggctttttcagggagaccatcagtgggtgggagaagatgtctcatctccgcccgagtctccattgtgagctttctgagcatttcaccatggagactcggcacagacgtgttccttggctttcctgtaggaatccagggcccaccagagcttcccttagcaccagcagtggcagctggttcattttgccaccctccagtagccttttcctggtggttctgcattgtacctgagaaagagccaggactcagttgcttttgcaaagcagaaccctgttcccttgcagcacctgcctgggcccccagggagccaaaagactgctctgctaagttctctcttttctggaagttgctcactcgagaagaatgaaatctgcccgccatggtggcttatgcctataatcccagcactttgggaggctaaggcgggaggatcgcttgagctcaggagttggagaccagcctgggcaacatagtgagacctcgtctctcaaaaaattaataaaaattaagaaaaaaatcaagacaagaattgagtagaaaccatttggtttatgttctgcttagcaggagttcctaatctggaatcctaaagttgtatgcattttatggggagagagactatggtttttatcagaatcccagaaggatcagtaactcctccctctcccctgctcatgtattcgattcaaaaacttaaagcccactcttctgtggccctctttgtgagtcctagaatgaactctaccctggaaaaatcagtgaccctaatggaagctctggttgggtgtttgtcatttctttcctcagctgatttctcccctcactgtcctttcttgattctcaaaccctctttcctttggcaggatcgctgcagagcagagcagtagattggcaaaatataggacactacggtaaagatgaagggcggactcatcccagaagcagggtcccttccccgtcttgcccgcctcatgcatgtcagttatctctctagttttcagcccacttgctcctcccacccctccctaagccacagctgaattctgaggctgcttttcaacttgctagatgaggttgtgactggaccagggcaaaagcttcctgagttagcccagctgatgggataactttgcagtgagcagctttggcctggctttgactgtataagacttcattctcccttatatcccgtggggtacttacttatttatagacaagcctctctctctgtttccaggacagctgagatgaggataagacaaatccaaaattcattaaatgacggtcccatggcaaatcctggcacaccttgtcactgtttctagacttttctgtaacaccgatctctagttgggctaaacattgtggtctggggagactgtaatttatgaaggactgatggccacagatcaaagccagcatcagaatccaggttcctagcactcagggtatgttaaaagggctgctccccatgtgactaaaatgtgaagtgagattccactcattctccttctgcatatcagtcctaggatgggagggaagtggagggaaggagaaggagagtctgatgcttcactgatctgctccgctagaccagggtctggcaaaagttttctgtaaagagccagacagtattttaggcttaactggccatatggtctcttggcaccaactactcaactctgtcactgtcatgtgaaagcagccatagactgtataaacaaatgggtgtggctgtgttccaacaaaactttattcaccaagacaggtggtgggctggatttggcctgagtggcacagtttgctgacccctgccctagaccaacaaagggaggggaggtatttgaattttcaagtcatgttctcctttatcctttgccttggaaatggctttccctgccaaagccacaaaaccatctaatttctaatcctctgaaaataggagagatcaacaaaagcatagtatttggagcctttccatggatgtgtgagcataagctgggtcacctagtcctcaacacagaagggaactgcatttgtttgtttgtttgtttgtttgtttgtttgtttccaggtttaatggagttgtaatttatctgcagaaaaatgtaccctttttagtgtacaattctgtgaatcctgaaaaacctctgtagtcatgtagccaccacctcagtcaagatataggtattgccactctccagagagctccccggtgccccttttagagtccgacccttctcccacccccactccctggctatgcccgtttggtttcatcctacattatagtcactctgtctgagatttgctttcagcaactgtccttgctgctacatgttgagttctttaattctttaaataagtcgatttcttttcttgattaaaaagaactttttttatagagatggggtctcattatgttgcccaagctggtctcaagctcctgggctcaagcaatcctcctgctttggcccctaaaagtgctgggattatagacgtgagccaccttactcagtctcttgagttttaaagtccgttcccaccctgctatccccaaatcattgcttgaggaagaggaaagtcacttgatcatttggacatttggcatttcctagcatttgaaaggaaaccccctggtagcaaagtgttcttgatctgagggcagacattgatttgagcagacataatgtgggacgtaagttctagccgcagtcaagagttgtgggccactacccttcggctgttcttatttcatactcatgccatcctttctgcatgaacatttctgaatgcccacatattagtgtacctaagaacctctgaatactggcaaggaattaggggtgcacaccccagccctcaagattaattccatgcctgtgcatgtcttttggaactgctttattaatgggtttggagtctgccattctgcaagactggatcattatcaccttagtcctcacccctgggaagagctgccactgaaggatggtgtgtgtgtgtcagcaaccctgcctctgcttgctggagcctgctgggatcagttactcactgcagtcacctcctcagcttcacagtctgtctagattgtcattttcattcattgtgcttccccatccctccttagagtctagggaaaggcagcggaggggaaacaaagagtacaggagataggttcttatcccctttaacactttctgtgagctgagtcccatttttgagaatctttctgtgttaggttagatgctgagtgtgacttggcaagaacacggccacacggcaggaatgtgcaggtttctgtaatgaatggtcaggatgtcatgttctaagctacagaagggccaagtgttggttggcagagctggagtctgggagattgatgatgagcattatttaaactttgctctttgttcatctaattgaaatttacactgtgtttttggccttgcactgtgagaggtgtgcctggaattacctcatctccttatgttgtcacataccactttcttagttattattgagtttgttttgttatttgtatttaagttgtcatcagcttaattatgaactagctgtctcacattcttttgtaaaatgagatggggcatacataaatagacttgggagataaatgattattcccttataaatgggatcttagagcgggagagtaccttagtctctctgttgtcaccagttaggaactgtaactgtgaactgaaaccttcagtaattctgtgtttgtctccattttctttcagaacagcacattagttccagaagaaagatggaaattctgaaaactgaatgtcaagaaaaggagtcaagaacaattcacagtatgagaagaaaaatggaaaaaaaaaactttatttaaaaaagaaaaaagtccagattgtagttatacttttgcttgtttttcagtttccccaacacacagcagatacctggtgagctcagatagtctctttctctgacactgtgtaagaagctgtgaatattcctaacttacccagatgttgcttttgaaaagttgaaatgtgtaattgttttggaataaagagggtaacaataggaacaaaggcctgattgagagcttattctcatacttttgggtggtggggtccttgggtatatgacatgaggacttagttggaaatgctgttgatgccagcatatttctccaggcctttcttggtccttcttgccccttgctcctaacagaactgagaactgcctggaaaggccagcttccttttttcttctccagcagtgagcaccagctgtctgcataggagccctgttggtatctgaaggccccatttggacctctaggggtccaaggggataggtttttatcccctttaacattttctgtgagctgagtcccatttttgagaatctttctgtgttaggttagatactgagtgtgacttggcaagaacacagctaaacaacaggaatgtgcaggtggactgcagctaggacctctgctcaaggctcttgtcttggggccaggcatggaggctcacgtccgtaatcccagcactttggaaggccgaggcagggggatcacttgaagtcaggagttttgagaccagcctggccaacatggtgaaaccctgtctctactaaaaaaccaaaattagccaaggggtgggcatggtggtgcatgcctgtaatcccagctacttgggaggctgaggcaggagaacagcttgaacttgggaggcggaggttgcggtgagccattgcactccagcctgggccacagagccagactccatctccaaaaaaaaaaaaaaaaaaaaagacttgcatggagatttgttgcaacatgaattttcaagggacacaaattcaaaccatagcactgaccacttgagtgactttagtctagaaggccacatctcaagaatgccccctctgaagttgtgcccattacatgaggttatataatagcacagagagaagtaatactgcatagcatggttgactgcgtagactttggttccaggcaaacctagtgttgccacttactagggtgagggaccttgggcaagtagtttaacctccgtaaacctccttttgtgtttctgtaaaagagagatgataactacctacctcataggattaaaggagttgaatgctgacgcagcttagcacttggcatctttcctgattgacctacggttatgtgccttggcccattgcctctagttctagaatggcaaaaactgcaattacttttgcaccaacctaatattaattgaaacataataagtttagttaacttgtgaaatatggtaatcctcatagtatttattgaattgggggtctggaagttgttttattttaatcagattgcttcccaactagctggaccttactacagtgaagaaattgggattttgattgggaaaaagggaaagaagattctagaactctatgccgttctgaatgggatcctataggtaagaggatgatgtgggcagttacagggatgcctctaagatgggaaggaggcttctccttcccagaggttgcaaacttgtgatctgtagtgtttttttaaaaattgagtaagttgccaacatttgaagacagattttatataaaaatcttggttttggattctggattctcctgaaagagaaaactagagctgtccacggcgggcctgattcctgaacggcagcagtcagctgacactgaatagcagctcgtccctttggatggagcctgcaagctccagcttgtcagcccctccccgcacaggtgtccacatacaggacacttgcgccagtccacctggcgactgtgcttctctgatacctgcctggctcccataggcatatacctttgggatcctccactttttagtttcttatcccactcggaggggaaggggtgatggtggtttcctgttgctcttgggcggctcctagtgttcctacttaggtgtgctgggacctcagccgctcagactggagaggaaagagagccccagcagcgtgtgggatgagagcagggacacttgccacctatcaccagacctgtgcgggcctggaagacagactgggtgcggggctggtggacagtggtgtggagcaggggtagtagggcctgagggtggaagtacaaaggctgctgggtgtcctggtcactgggaacaaaggacagccagtggctggaaggaaggaagtcgggaaacagctttttggagaaacggctggcacagctaagtaaggggttcccgggctggtttggggctggcctgcagactcagatgggagctggagaacagagcccagtaaacattgccatgtgccaggctgtgttctgtgtccagagctaccacagggagcaagacagatccagtcccttcccttggtccaggtacagcccacgggcacccagctgagggagaaaggaagcagtgatcacacatgtgagaagggcctcagaggaagcagttcttaccttgatggcttgggaggtctcagctgagacctgaagaatgagaaggcgcctatgccaagctgaggaagagcactccggccagagaatcagccagcatggaggctctggggcaagagcacggcacattctgactggaagcaggccaagcagccagggtgtcactggcaggaacggcatcctcgctgggatagaagccagaacaaacttggcttttaggggctgtggtaaaggggactgatttttctcttaggaccttttttaaaacaaaacaaacaaagagatggggtcttgctatgttgcccaggctgaccttgaactcaagggatcctcttgcctcagcctcctgagtagctgggactacaagcatgcaccatcacgcctggccagcctgagttttattttggggtatagcagaggcagatgctgtctgtctgaccctgcccactgggcaaagcctttttttttattttttattttttattttatttgagacagggtcttgctctgttgctcaggccagaatgcagtggtgcaatcacgactcactgcagcctcaacctcccaggctcaggtgatccccccacctcagcctctggagtagctgggactacaggcgcgtgccaccacactgggctaatttttgtatttttggtagagatgggattttgcaatgttgcccaggctggtctcatactcctgagcacaagcaatctccccgacctcccaaggttctaggattacaggcaggagccactgcacctggcctcaaagcctcttaaagggactcggctctcagtgctggagcagtgctgcaggggaataacctggttgctatagccaagacagtctgggagtccagagctgacagcaggcctctctcttataattcatgaaatccactggattcatcactcaaatgattcgctgcagtagcgcctgggcctggccttctctgaggagtacaagacatgccagctttagagtcagagctgcttcgagttcccccattagctgtgtgtccttttgtacctttacctctctgggccttggtttcccatcagtaaaaatggggatcatacctctgagggttttatagggattagaggaggccacagccacaacacataccacagtgcctgacacttagcattgagtcagtgtttgctcccaatagcgcagatattgtcatcattattatttcccaggtggtgttaacaggagcccagtcaacagtttgtaccaggtctacattcacctgttagttcaagttactcgacaccccagctccctcatttcctccccagcatttcctgaggggcctggagtcttaaagcaaccttttcgagagagtgttgccttccctccccgccccatcagtcccgtcctgccaacctggagcgactctagttgaatctgacctctagttggatccagctgggccaatgtgccctgccctgccttcctcaggggcctgttgtagagaacaaatgaagtaatggatgggaagcctctttgtgaactctaagttaatacaaacagaagagattatcattaaaagcgacaagtcccccgttgattagagcatttctttagggagaaaaatagcactccgtcttaagtaggaccctccccggagtgggaagctcccagctcctctgcggggcaagtggagtctctccgacgccattcgtgccgtggttaatggtatggagcactggagttgttgctatggtggtttttcccctataattgcattcacctccaaaaccacaagtagcagcaggtcccagcagtcgttattttatttgaaaaactaattggaagttgaaagagccctcggcttttgcttttgtcaggataggccaaggaaagagatgagcaggtgggtctgggaggaaggagggggtcttggggcaggccgggcgcgcctcccattcacagccccttcctttgtgcctgcctctcttggttgaagtgggccacctgccctctaaggccagccttttcctccgagggggcttttgtctcccattgttctgattgtctcctccgtggagccgcctcagtggccccctgcagacggtttcccaggcttcacgttttttttctcaggcgcccagggagagcaggtggtctttaccctggaaggaactgagttggttatatagttctggtgctgggagaccagagacctggctgccaggcccttcgagcttgggtcattccttccctgacgacactgtcttaggctacaaaatggagaggtgggattgttcactccatcaatgttaagatgctgtgattcttttcgcacttttttttttttttttttgagacagagtcttgctcggtcacccaggctggagtacagtggcgtcatcttggctcactgcaacctccacctcctgggttcacgttgattctcttgcctcagcctccctagtagctgggattacaggcccatgccaccacacccagccaatgtttgtatttttagtagaggtggggtttcaccatgttacccaggcttctctcaaactcctgacctcaaatgatccgcccgcctcggcctcccaaagtgctgggattacagacttgagccactgcacctggcccctctttttgcactttttaaatcaaaacagacatcccatcatctagacttttcacagttgtcaggttttttttaggtttaatttacgtacagcaaaatgcacagatcctaagtgaacaacccaatgattttttatatgtgacaacactggtataaccaccacccaaattgaaatatagaacatttcagtcaccccagtaagttcacagattctgatcagaggcacgcagagggcaggtgatgtgtggcgatatttggcccagataaaatggctcatgaatagcaagagttgggtaatcactgatgcgggagcctcgggtcagtggctccagttctctgcttccctttatagcaaaatttctcaaaaaaataatctctaccagcgctgtccaatagaaatacaaagcaagctacataggtgattttacattttctggaaaccaagataaaaaagttaaaaagaaacaagtgaaattaattttaatatattttatttaacccatatatctaaaatatcattttaatatgtgatcagtataaaaatactgaggtattttgtattttttcatattaaatctgagtgattcctacttggacctttaatctgtggggtgttttgttttatttattctttttttggagacagagtctcactctgttgcccaggctggagtgcagtggtacaataatagttcactgcagcctcaaactcctgggctcaacaattctcccacctcagcctcccaggtagctgggactgcaggtgtgtgtcaccacgcctggctaattttttttgaatttttatttgtagaggcagagtcgagctatgttgcccaggctagtcttgagctcctatcctcaagtgatcctccctccttggcttcccaagaatgctgggattgcaggcatgagccaccatgccccagcctaaatccagtgtttattttatacttaaagtacatctcagtttgtaccagctacatttcaagtgttcgttagccacatatgtctaggggccaccctattgcacagccaaatctatactcaccagctctgattcctcttctcccatttctcccactcaaatcagactttggccttcactacacctgatttctctttgccaaggtcatcagtggcttccatggtcacttccatggtcagttctaaactgacttgtcccatcagcagcatttagcagagcagatcacccctttcttctagaaacactcttcattggcttctgggattcttctttgaaggagttttcctgttacttcactgcctgctacttctcagcctcctttgctggttcctcatctttcctcaaaacttttttttttttttttttttcagacagtcttgctctgtcgcccaggctggagtgcagtggtgtgattttggctcactgcaagctccgcctcccaggttcaagtgattctcctgcctcagcctcctgagtagctgggattacaagcgtgcaccaccatgcctggctaatttttgtatttttagtctagagacaggatttcgtcatgttggccaggctggtcttgaactcctggcctcaagtgatccacctgccttggcctcccaaagtgctgggattacaggcgtgagccactgcacccggccttcttctaaactttaaatgtagggtttccaggggatcagtccctggactttactcttcctatattcttccttagtaatctaactagtcttttgactttaaagaccgaccgtctaaatggtgacaactaccagccaaaccagctgtccagacctctcccctgaactcaggggactctctcctgaactaggacctgtacagccatgtgcctactcaacttcctcacttggacctttcataggcacctcacactcaacattcaaacctaaactcttaatattcccccaacccccaaagctgctaagtggcaactccatcctcccatcctccatccttgggccaaaaactcaggagtcattcttgacttctctccaatccctacaccctgtctatcagcaaatggcttccgccctaagaatgtatctagagtttgaccatttctcagagtgattttcagcataggtcacagcatgtcattcttctgcttaaactccaccatggctttcatctcaccaagtttgggatccaaatccttactgtgaccttgttaaagaacatttatgggaggccgctgttttgaactgagctcttgcactaggcgggccccaacaaaccagacccaaccagaatagagtcacccatgacatactaagtgccatgtcatcaaacagaactttaaaatggtccagttttctgaaatatgagattcacagcagccaatcagaaggggtccagttgggacaggcacagtggctcacgcctgtaatcccagcactttgggaggctgaggcgggtggatcacctgaggtcaggagtacgagaccaggctggccaacatggtgaaaccctgtctcgactaaaaatacaaaaattagccaggcgtggtggcagatgtctgtaatcccagctactcgggaggctgaggcaggagaattacttgaacccaggaggcagaggttgcagtgagctgagatcatgccaccacactccagcctgggtgacaaagcaagactctgtctcaaaaaaaaaaaaaaaaaaaaaaaaaggaaggggtccagtctactttagcttgcataatcaggaagtcccctctgctttaaccccagaaggaaggtaactttgaaatgaccaatctgcttttcgtgccctgtttctgcttctttagcccctttttgcctgtaaggcccactcccactcagcttatcagagtccccctcaggatgctgcccagttcatgaactgctaacaaaagccaattcaatctttaaaactctatttgggttgggggtggtggctcacacctgtaatcccagcactttgggagtctgaggcaggtggatcacctgaggtcaggagttcaagaccagcctggccaacctggcgtaaacctgtctctacttaaaaaaatacaaaaattagctgggtgtggtggcacacgcctgtaatcccagctactcgggaggctgaggcaggagaatcatttgaaccctggcggtggaggttgcagtgagccgagatcgtgccagtgcactccagcctgggaaacagagtgagactccatctcaaaaaacaaacaaacaaacaaacaaaaaaaacactaaagagtcaatttgttcctttttttttttttaacacctccaagtgtccccatgagccggcctcctgctcctccaggactcttttctttccactgacatccttgctctggcccaggtagccacattgatccccttgctagtccttccacactgctgcctctaagcctttgttgagttttcactctgcctgaaatgttctttactctgatatttacaaagccaactccctctcttcctcaggtctttactcaaatgtcacatcatcagtgaggccttcacatatacacagtgtagatcaaattatacccccagcactccctggccctttaaagctttatcctttgcacttgccaacatctgacatattctatattgacttgtgtttattattctctcccccaccacacacgcattggaatataagctctataaggtcagggactttgttcatgactatctctccagtgcccagaacagtacctggcacagagtgggtattctataaatgtttgctgaatgaaggccgggtgcagtggctcacgcctgtaatcctaacactttgggaggctgaggcaggcagatcacctgaggtcaggagtttgagaccagcctgaccaacatggagaaaccccatctctactaaaaatacaaaattagctgggcgtggtggcacatgcctgtaatcccagctactcaggaggcgagggcaggagaaacactggaacctgggaggcggaggttgtggtgagccaagatcatgccattgcacttcaggctgggcaacaagagtgaaactctgtctcaaaaaaaaaaaaaaaagtttgttgaatcaataagtggtattgcttatagaagagcaaatcacacgtgggtgaaggatgactttgatcgaagttagttgaatgtggttaagagctggttctgagttggacttgcctggatttgaatcccagcgctctcatttgcacggtgtgactgtgggcaatttggttacactttctgagcctcaattccttgtctgtgaaaggaggaggataccagtaccctccatcagcctgtgtaaggagcatatgagatcctatgcatgaagctgcctggtttgcactctgcgtgcttggtaaatgttagctttaaaaaaaattacacctcgtaataccactttgggaaatgtaactatgtaaaacacataaaaaattaggctgaagagaaaagaacatttaaatgcacaccggtatgggggaattttattgtattttcaaaggaaaaagtgggtcagaaatgagaggattaactggatccagttgcattttggctacaggtagcccgggtcacaggaggaatcttcatccctgggagttcctgctgcagaaagaaagatcaagctcaatccggggaattgaagtaagggtggctagagtgggatgcatggaaccagggtgacgggtgctcccgtgacaggagctggccttttggattccaaaagaggcagtgtggggtggagggaaggatgcgcaagcatgccagcaaggcgagtcccaggcttagcccctgctctctgctctgccagccaactcccaccgagaccctgggccagtcacttcgccttgaagaagcttcctctaatccccagacaggctcagcgttctcccagcctcaccatcaccactccccagcatctcttcccattcatcacaatgaagtaattgactgtacaagaacgtgtctagttccttgctgcttcggtgtgttatgaattccatgagagcaggggtcgctgctgtcctgtaccctgctatgcctctggtccagagtgtggcatgtcatagtcactggatggtctttacaggggtgggaagatggctaaacccgagcctcagtttccttacagggctgttacgtggacacaatgtatgatggctgcaaaagtgtgccatctgtcacatggctctactctgcactctaaagcaggaacttattcctgctcaccagtgatatcctggtatttgcagcagttgagctggagggggaacaatggctatagcagccttcggggcccttcctgccagctctgcgggctctgtgatttcaatctccgtgaagcctctggcttttaactcgcgggaacaaagcctgcattcttaggattagccctccatggagccatccaccctactggggcctgatgagagccatagcaggtgaacaattacttaatcccagcctgcaaggcacagaggaggccttcttcttagagacattatttttgaactcttgtcttgcggaccctagagatggtaagagctaacccctcctttcacagagtcgaaacgaagaagtgtgttgctgtgccgctagttgcagaaacaggcctggggcccaggtgttcttcccgcctcccagactggttgtcgcctctcctgtcatctgccgtaggcctggtgctgcttgtaggtggtgaaatctctgggctggtggtgtctaatcgggttgggaagaaggtgagagaggccatggagcgctctgctgggaactggatttgcttaatagcttggaccagaagtgcccagcagagccacactgggacctgcttgtgctcgcagttaaatcaggctctaggccgggtgcggtggctcatgcctgtaatcccagcacttagggaggccatggcaggtggatcacctgaggtcaggagttcgagacaagcttggccagcatggtgaaaccccatctctactaaaagtacaaaaaattagccgggcgtggtggcgggtgcctgtaatcccagcactttgggaggccatggcaggtggatcacctgaggtcaggagttcgagacaaacttggccagcatggtgaaaccccatctctactaaaagtacaaaaaattagccgggcgtggtggcgggtgcctgtaatcccagcacttggggaggccaaggagggtggatcacctgaggtcaggagttcaagaccagcctggccaacatggtgaaaccctgtctctactaaaagtacaaaaatcagccaggcatggtggcaggcgcctgtaatcccagctactcgggaggctgagaatcacttgaaccctggaggcagaggctgcagtgagccgagatcacgccactgcactctagcctgggtgatgagagtgaaactccatctcaacaacaacaacaaatcaggctctaaaccccagcagagtttctccaaacaaccacgacatttttgggaaactttgcccatgaagtgggggctttgtgcaaagaagttccagggaggcaaaacaggtctgggcctgccattccctgacttggggccagctgccgccccgtctttgcctcacttttcctcctctgtagactcccaggagaaacgtgagggccagtgagctggggaacgacagtcatcacgtctctcgtctgctgatcgtgtgtctgcgcacactcatctaccacagggtgtgggagggctggtctgtctttggcttgatagttttttgaacttggcaagggaaccagagcatgcctgtcagttcacctgcagccgaatccttgggaacacctgttaaaattcagatttctgggtcgtatcacggaaccatttggtgagtaacatttttgggcatggacactgagcctggcctctggctccgcactgggatacagccatggataagatgcggtctccatcagacactttccacccttcatgactaaagaactctcctaatattgattgattgattgactgattgagacgggatctcactatattgggcaagctggtctcaaactcctggcctccagtgatccttccccatcagcctcccaaagtgctgggattataggcatgagccactgcacctgggcactcccctagttcttcttctttttttattttagacagagtcttgctctgtcacccaggctggagtgtaatggtgcgatctcagctcactgcaacctccgcctcccagcttcaagcgattctcctgcctcagcctcccgagtggctgggattacaggcgtgagccactacacctggctcatttttgtatttgtaatagagacagggttttgccatgttggccaggttggtcttgaactcccgacctcagatgatccacccaccttggcctcccaaagtgttgggattacaggtgagccaccatacccagccactctcctagttcttaatgtctgtcaggagggtccttgttcttggtttgtttggcagagccccataccttcagagaggagtggattttttccttttcctggcaaaccacggggtaggaagccctgaagtccctagatgcacccatgcacacacacccatacctgtgcttctgcagcagggccaccaggatgctctccaattccatttgcttttgttctgcccacatgctgtctacctgacgaccaagccgtgcccttgctcctcgctcttggttgctctctctgtgtggttagaaaaagagaactagttgctatttgggtaggatgtggaaaggcaggggtatatccctatgcctatttcaatatctggtgtggactcttctacccaactgaattagattcagccacacttagggaggcagtatatatagtaatgaagagcacagaagtacaagtgtacacagttgcaaaacgtctccccacagattattaatgatagagggaaaaataactttatagaggagaaacctagcagacaccatgttaaccaactgatcaaagttaccatctaccaataatccaccaataatggcacaaattgccatcctgtgcctcctgataccaggcactgagaaggacacaacactacttctgtgaatgcatcacctgattcctctaatcatcattagaggaacgcatcctctaatcatggggatatgtctggcaaattcaacatgagggacattctataaatcattagcctttactaatcaaaactgtcaatgtcatgaaagactgaggaacgattccagattaaaagaaactgaagggacatgacaactaaatggtatccatgatcctggattgggtcccagatcagaaaaagaaataattgttataaaggacattttgggacaactggtaaaatttgaatatggattataattgataattatattatgattatgtaaggggatgtcctttggttaggtattaggaaacacatatagaagtacctaagggtaaagggtcatgatgactgcaatttactctccaatggttcaacaaaaatgataagaatacttaatgtgcatatgtgtttctgtgtgtatgtatctatatctagctatagatatagagtaagcaaatgtgataaaatgttaggaattggaagtgtatatggaagtccattgtgcttttgttgcaacttttttgtaagtttgagatttttttcaaagtaaaaactaaaaaacgtataggctatagagtcaggcagtttggctccaaactctgccactctttgtgtgtcctttaaaagctattaaccctgggccagggcgcaatggctcacacctgtaatcccagcactttgggaggccgaggcgggcagatcacgaggtcaggagatcgagaccgtcctggctaacatggtgaaaccccgtctctactaaaatatacaaaaaattagctgggcatggtggcgggcacctgtagtctcagctactcgggaggctggggcaggagaatggtgtgaacccgggagggggagcttgcagtgagccgagattgtgccactgcactccagcctgggggacagagagagactccatctcaaaaaaaaaaaaaaaaaaaaaaaaaagagctattaaccctgtacaatggggataagggttgttatgaagattaaagaagaaactaaaagctgggcaaggtggctcacaactataatcccaatgctttgggaggccaaggtgggaggatcacttgaggccaggagttcgagaccagcctgggcaaaatagtgagaccccatctctacaaaaaataaaatagtcagttgtggtggtgcacactggtagtcctagctacttggtaggctaagatgggagggtcgcttgagtccaggcatttgaggttacaatgaggcatgatcattccactgtactccagcctgggcaacagaatgagaccctgtctctaaaaaaaagaaagcaagaaactaagaataatagtagctgacactaccaagggcatctgtgtgcccagcactgtgccaagtgtctgtaaatgtcctagggcagagcctttgtttttggcatggagtcatgattaaatggtaactactaccagtgttgttactgtcggagcctagcctgaagagacacgtggtaggcatggaggtaagttgaggtttaacgctggaacccttttgctatgggaagtccagaaatgacacttgctgtgccaaggaagagatctgaattggtccctggtcccctgtagggaacaagctcctgcagactctgctgcagggtgtgggaagaaatcactagaactcctgcttacccctgctgcctgctcatgatgtcctggagcagcttgcgggcggacagctggcccagcaccttccggtagctgttggtgaagatggcatctgcataccgccgcatcctgtgcggaaggagtcaggggtcagagggcggggtggaggccaggcgagaggacagtcgtggctgcactcgccatgtctctgcaagatccttctgttgccatctgtcccactcaccccaagagagactcagacccctctgagtgacctctgtgaagctgtgtctgcctcctctgcaaggacgggcagtgggtgctgcctggagacatagccagggcccagctgatgggctgagtctgcattcactaacgcctgccccatggcagggatggcttgggagtggtgggaactttccccagggtctgcttacctgagggtcaaagggggaggtggggagcagtgggagctgttgctgagggtgaggatcacaaagaagaacacccagagtggcatccttcacccggggtggcacctgcagagtgacaggaggggaaggtcaggtacagccacagccattgggatggccttcactggcccagccctgggcttggctccatggcaagccttggtccttggtttttggaagctgtgggatgggaaaaagaacccagacactggaagtcagacagacctgagttcatgttctgcctctgccagccacctgctctgacttcattttctccatctgtagaatgggcgtgatggagctcccctgccaaccacatagggttgaaccaaaaaccagtgatagtagggaaatttccccttgccataaggtattagaagtaggatttgggctcaggcacagtgactcacgcctgtaatcccagcactttgggaggctgaggtgggcggatcacctgaggccaggagtttgagaccagcctggccaacctggtgaaatcccatctctactaacattacaaaaataagacaggagtggtggcgtgtgcctgtaatcccagctactcaggaggttgaggcacgagaatcccttgaacccaggaggtggaagttgcagtgagccaagatcgtcccatgcactccacgctgggtgacaaagtgagaccctgtctcaaaaaaaaaaaaaaaaaatttaaataaatagaataaatgggatcccttagcaaggaatggggaaggtcaaagaaccttctctcagtgcccctcattcaaccccatccagtgtggcagtgaaagcaggcagcaagggtaactgctcagctctgagtcagacaaactggaagttcaaatcctggctctgctgtcattagctgtgtgtcccaggacaagtggcttcacctctctgagccttattttccccggccataaaaccaagatagtaactagacctcctacttcggctcctggaaggatctggtgaggtaagtgcctgaaccaatagggaattctctagaaacctttgctgtgtctacctaagaccaaccctctcagagggcaggctcttcctgttttaattttgtttggagttggagagaggggagaagggctctaagtcttgctccagatgcttagattttgctgaagagttttagtcctggaagagactgaagagccgggggatccagtgtggcgcagtcatctcataggtcctgtaactacccttaattggggcctgcggacagcatgctctgcaattaggggaaaaacagccagcaggggacagagcccgcctccgctggggcaagtgccactgctgtcagcccagacctgcccaagcatggaaacacggctggcctcgggggacttggccacctaggaattgggtcctcccatctcccatgggtttctccctctctcagcaggatgtctactccatgggggtgtagatccatccagaagcccagccagccccggaggtggccagcacccccgcctttcccacaatctcctcacatggcttccttctctcccactcctgggtcctgctgaggagttctggcaggcagggccagcactggcagaacccaccttgctctcccggccctctcagggtatcaccctcctttctgaaggcactgaagtctcctctaacccagggatgccttgggcccccaggcagcactcagggggtctgcttactgcagcctgagaccctgtacctgcagagctggagggagcagcagcccaggcctcagtggtcagcccctccctccatgacatgagcatccccacaacacgcacactggctgtcctccacttcctgctcgagtgagcacttgctgccagcgaatgacagggatctcactacccccaggcccgggagcttatttccagatggttctttatttatttattttgagagcgggtctcactctgtggcccaggctgaggtgcagtggtgcaatcatagctcactacagcctcaaactcctgggctcaagcaatcctcctgcctcagcctcctgagtagctgggacagcaggcatgtgccatcatgcccagctaattttgaaattttttgtaaagataaagtctcactatattgccgaggctggtttcaaacccccgggcttaagtgatccccccgcctcagcctcccaaagagttgagcttataggcatgagccacaatgccaggcccaggcagttcttattgttaggaagtttgtctcaccatgtcaagcccaaatctccttctcctgcaaatgtttgttaagcctctactgttccggtaaggactggggctagagaaaagatgagaacacgggatctaccccgagggctggctgtgtaacatccgcctgctgggctggagcctctgcacctacagccacacgactggtcctttagatatgttccgcatgtctgacttaagcttttgttcctcagaccaaggctcggcaggcttccgtcctcctcatcgcaccataccacgtctggtcccccttctccccacctggtccaggctgcctctccagaagtggaatttcctaagccgagagatctctggatgcaagcagggccccttgacagaaaccactgccttttctgtctcccagctgcagcctggctttcttgccttctttgctgctgatcttttaaagattcaggcagatctaggtccccaatcacctccctcccctgctcagaagcccttggctccccactccttccagaataaagctcaaaccccttctcttggcttaagctctccctctgcctgccccttctcccaagggctggcacaagtgattcccagcccctgtgccctatcaggctccacaacccatccttgcactctccctctggagcaggcatccccatgctcctcttacagccaaggaaaagagcctagagaggacaaggacattttccatgatcctccatcaaattagttttggagtgggcacttcagagtgggcctcctcattcccaggccggcagacttccttccgctccatgcagcagcctcccaggtacaatgctctattcacagtattccccattcacagggatcctcagcctccatcacctgcacgtgggaaagggtctgaaaaaaaggaaagcttcttgctctttgttgttgggcctctggggaagaaagaacagggacaaacaggaacacctgcttgattggcccctccctatgcacacccagtagtttcagggagttgaaacaacctcataggagggcagactttggtggggagggcaagtcatagtaaacacaataccccgctcattcaagataaggctcagcaactgcacaagttaaccaagaggctcaacatttgccacaaatcctgtgccccaggcataggtcaagaccccacagcaacctctgagctatgagaaccgaatccatgggtttgcagatcccactggatgaaaatgggaaacaagaattatccagtgtagggtaagataagaagaatagaggttatgtcactaaggataaaatagctccagcctgagcaacatggcgagaccccatctctacaaaaaaaaaaacacacaaaacaaaacaaaaaaaaacttatctaggcatggtggcgcatgcctgtagtcccagctactctggaggctgatgtgggaggattgcttgagcccgggaggttaaggctgcagtgatccatgatagtgccactgcacagtagcctaaatgtcagagcaagaccccatctcaaagaataaaataaaatagctgtcaacagacacattccacatgacaacttaaggagtcaaaattcactgaatgaagtgtagccgagcccaacagcattgctggcaaccctgatgactgaaggcactccagagtttataatctatcattatgatc

SEQ ID NO: 724 - DNA, 3000 bp, Homo sapiens
gccttttcattttacttcatcctccaaggagttcaatcacttggcgtgacttcactacttttaagcaaaagagtggtgcccaggcaacatgggtgactggagcgccttaggcaaactccttgacaaggttcaagcctactcaactgctggagggaaggtgtggctgtcagtacttttcattttccgaatcctgctgctggggacagcggttgagtcagcctggggagatgagcagtctgcctttcgttgtaacactcagcaacctggttgtgaaaatgtctgctatgacaagtctttcccaatctctcatgtgcgcttctgggtcctgcagatcatatttgtgtctgtacccacactcttgtacctggctcatgtgttctatgtgatgcgaaaggaagagaaactgaacaagaaagaggaagaactcaaggttgcccaaactgatggtgtcaatgtggacatgcacttgaagcagattgagataaagaagttcaagtacggtattgaagagcatggtaaggtgaaaatgcgaggggggttgctgcgaacctacatcatcagtatcctcttcaagtctatctttgaggtggccttcttgctgatccagtggtacatctatggattcagcttgagtgctgtttacacttgcaaaagagatccctgcccacatcaggtggactgtttcctctctcgccccacggagaaaaccatcttcatcatcttcatgctggtggtgtccttggtgtccctggccttgaatatcattgaactcttctatgttttcttcaagggcgttaaggatcgggttaagggaaagagcgacccttaccatgcgaccagtggtgcgctgagccctgccaaagactgtgggtctcaaaaatatgcttatttcaatggctgctcctcaccaaccgctcccctctcgcctatgtctcctcctgggtacaagctggttactggcgacagaaacaattcttcttgccgcaattacaacaagcaagcaagtgagcaaaactgggctaattacagtgcagaacaaaatcgaatggggcaggcgggaagcaccatctctaactcccatgcacagccttttgatttccccgatgataaccagaattcaaaaaaactagctgctggacatgaattacagccactagccattgtggaccagcgaccttcaagcagagccagcagtcgtgccagcagcagacctcggcctgatgacctggagatctagatacaggcttgaaagcatcaagattccactcaattgtggagaagaaaaaaggtgctgtagaaagtgcaccaggtgttaattttgatccggtggaggtggtactcaacagccttattcatgaggcttagaaaacacaaagacattagaatacctaggttcactgggggtgtatggggtagatgggtggagagggaggggataagagaggtgcatgttggtatttaaagtagtggattcaaagaacttagattataaataagagttccattaggtgatacatagataagggctttttctccccgcaaacacccctaagaatggttctgtgtatgtgaatgagcgggtggtaattgtggctaaatatttttgttttaccaagaaactgaaataattctggccaggaataaatacttcctgaacatcttaggtcttttcaacaagaaaaagacagaggattgtccttaagtccctgctaaaacattccattgttaaaatttgcactttgaaggtaagctttctaggcctgaccctccaggtgtcaatggacttgtgctactatatttttttattcttggtatcagtttaaaattcagacaaggcccacagaataagattttccatgcatttgcaaatacgtatattctttttccatccacttgcacaatatcattaccatcactttttcatcattcctcagctactactcacattcatttaatggtttctgtaaacatttttaagacagttgggatgtcacttaacattttttttttgagctaaagtcagggaatcaagccatgcttaatatttaacaatcacttatatgtgtgtcgaagagtttgttttgtttgtcatgtattggtacaagcagatacagtataaactcacaaacacagatttgaaaataatgcacatatggtgttcaaatttgaacctttctcatggatttttgtggtgtgggccaatatggtgtttacattatataattcctgctgtggcaagtaaagcacactttttttttctcctaaaatgtttttccctgtgtatcctattatggatactggttttgttaattatgattctttattttctctcctttttttaggatatagcagtaatgctattactgaaatgaatttcctttttctgaaatgtaatcattgatgcttgaatgatagaattttagtactgtaaacaggctttagtcattaatgtgagagacttagaaaaaatgcttagagtggactattaaatgtgcctaaatgaattttgcagtaactggtattcttgggttttcctacttaatacacagtaattcagaacttgtattctattatgagtttagcagtcttttggagtgaccagcaactttgatgtttgcactaagattttatttggaatgcaagagaggttgaaagaggattcagtagtacacatacaactaatttatttgaactatatgttgaagacatctaccagtttctccaaatgccttttttaaaactcatcacagaagattggtgaaaatgctgagtatgacacttttcttcttgcatgcatgtcagctacataaacagttttgtacaatgaaaattactaatttgtttgacattccatgttaaactacggtcatgttcagcttcattgcatgtaatgtagacctagtccatcagatcatgtgttctggagagtgttctttattcaataaagttttaatttagtataaacaaaaaaaaaaaaaaaaaaataaaaaaaaaaaaaaa

SEQ ID NO: 725 - DNA, 1243 bp, Homo sapiens
taaaaagcaaaagaattcgcggccgcgtcgacacgggcttccccgaaaaccttccccgcttctggatatgaaattcaagctgcttgctgagtcctattgccggctgctgggagccaggagagccctgaggagtagtcactcagtagcagctgacgcgtgggtccaccatgaactggagtatctttgagggactcctgagtggggtcaacaagtactccacagcctttgggcgcatctggctgtctctggtcttcatcttccgcgtgctggtgtacctggtgacggccgagcgtgtgtggagtgatgaccacaaggacttcgactgcaatactcgccagcccggctgctccaacgtctgctttgatgagttcttccctgtgtcccatgtgcgcctctgggccctgcagcttatcctggtgacatgcccctcactgctcgtggtcatgcacgtggcctaccgggaggttcaggagaagaggcaccgagaagcccatggggagaacagtgggcgcctctacctgaaccccggcaagaagcggggtgggctctggtggacatatgtctgcagcctagtgttcaaggcgagcgtggacatcgcctttctctatgtgttccactcattctaccccaaatatatcctccctcctgtggtcaagtgccacgcagatccatgtcccaatatagtggactgcttcatctccaagccctcagagaagaacattttcaccctcttcatggtggccacagctgccatctgcatcctgctcaacctcgtggagctcatctacctggtgagcaagagatgccacgagtgcctggcagcaaggaaagctcaagccatgtgcacaggtcatcacccccacggtaccacctcttcctgcaaacaagacgacctcctttcgggtgacctcatctttctgggctcagacagtcatcctcctctcttaccagaccgcccccgagaccatgtgaagaaaaccatcttgtgaggggctgcctggactggtctggcaggttgggcctggatggggaggctctagcatctctcataggtgcaacctgagagtgggggagctaagccatgaggtaggggcaggcaagagagaggattcagacgctctgggagccagttcctagtcctcaactccagccacctgccccagctcgacggcactgggccagttccccctctgctctgcagctcggtttccttttctagaatggaaatagtgagggccaatgc

SEQ ID NO: 726 - DNA, 1134 bp, Homo sapiens
atggcggacttcctgccgtcgcggtccgtgctgtccgtgtgcttccccggctgcctgctgacgagtggcgaggccgagcagcaacgcaagtccaaggagatcgacaaatgcctgtctcgggaaaagacctatgtgaagcggctggtgaagatcctgctgctgggcgcgggcgagagcggcaagtccaccttcctgaagcagatgcggatcatccacgggcaggacttcgaccagcgcgcgcgcgaggagttccgccccaccatctacagcaacgtgatcaaaggtatgagggtgctggttgatgctcgagagaagcttcatattccctggggagacaactcaaaccaacaacatggagataagatgatgtcgtttgatacccgggcccccatggcagcccaaggaatggtggaaacaagggttttcttacaatatcttcctgctataagagcattatgggcagacagcggcatacagaatgcctatgaccggcgtcgagaatttcaactgggtgaatctgtaaaatatttcctggataacttggataaacttggagaaccagattatattccatcacaacaagatattctgcttgccagaagacccaccaaaggcatccatgaatacgactttgaaataaaaaatgttcctttcaaaatggttgatgtaggtggtcagagatcagaaaggaaacgttggtttgaatgtttcgacagtgtgacatcaatacttttccttgtttcctcaagtgaatttgaccaggtgcttatggaagatcgactgaccaatcgccttacagagtctctgaacatttttgaaacaatcgtcaataaccgggttttcagcaatgtctccataattctgttcttaaacaagacagacttgcttgaggagaaggtgcaaattgtgagcatcaaagactatttcctagaatttgaaggggatccccactgcttaagagacgtccaaaaattcctggtggaatgtttccggaacaaacgccgggaccagcaacagaagcccttataccaccacttcaccactgctatcaacacggagaacatccgccttgttttccgtgacgtgaaggatactattctgcatgacaacctcaagcagcttatgctacagtga

SEQ ID NO: 727 - DNA, 383 bp, Homo sapiens
ttctctggcaggtgggcattaactaccagccccccacagtggtccccgggggagacctggccccggtgcagcgggccgtgtgcatgctgagcaacaccacggccattgcggaggcctgggcccgcctggaccataagttcgatctcatgtatgccaagcgtgcctttgtgcactggtacgtgggcgaaggcatggaagagggagagttctctgaggcccgcgaggacctggcagctctagagaaggattatgaagaggtgggcgtggattccgtggaagctgaggctgaagaaggcgaagaatactgaggggagggtgtgggtggctcccctccagggatggctgctccacggtttgcattaaaggttctgtataaggccaag

SEQ ID NO: 728 - DNA, 8304 bp, Homo sapiens
  misc_feature (2320)..(2320): n is a, c, g, or t
  misc_feature (2383)..(2383): n is a, c, g, or t
  misc_feature (2385)..(2385): n is a, c, g, or t
  misc_feature (2395)..(2395): n is a, c, g, or t
  misc_feature (2402)..(2402): n is a, c, g, or t
  misc_feature (2405)..(2405): n is a, c, g, or t
  misc_feature (2409)..(2409): n is a, c, g, or t
  misc_feature (2415)..(2415): n is a, c, g, or t
  misc_feature (2417)..(2417): n is a, c, g, or t
  misc_feature (2434)..(2434): n is a, c, g, or t
  misc_feature (2453)..(2453): n is a, c, g, or t
  misc_feature (2460)..(2460): n is a, c, g, or t
  misc_feature (2464)..(2464): n is a, c, g, or t
  misc_feature (2469)..(2469): n is a, c, g, or t
  misc_feature (2472)..(2472): n is a, c, g, or t
  misc_feature (2480)..(2482): n is a, c, g, or t
  misc_feature (2484)..(2484): n is a, c, g, or t
  misc_feature (2487)..(2487): n is a, c, g, or t
  misc_feature (2491)..(2491): n is a, c, g, or t
  misc_feature (2494)..(2494): n is a, c, g, or t
  misc_feature (2497)..(2497): n is a, c, g, or t
  misc_feature (2523)..(2523): n is a, c, g, or t
  misc_feature (2536)..(2538): n is a, c, g, or t
  misc_feature (2542)..(2542): n is a, c, g, or t
  misc_feature (2544)..(2544): n is a, c, g, or t
  misc_feature (2546)..(2546): n is a, c, g, or t
  misc_feature (2556)..(2556): n is a, c, g, or t
  misc_feature (2595)..(2595): n is a, c, g, or t
  misc_feature (2597)..(2597): n is a, c, g, or t
  misc_feature (2603)..(2603): n is a, c, g, or t
  misc_feature (2623)..(2623): n is a, c, g, or t
  misc_feature (3247)..(3247): n is a, c, g, or t
  misc_feature (3277)..(3277): n is a, c, g, or t
  misc_feature (3290)..(3290): n is a, c, g, or t
  misc_feature (3297)..(3297): n is a, c, g, or t
  misc_feature (3299)..(3300): n is a, c, g, or t
  misc_feature (3302)..(3302): n is a, c, g, or t
  misc_feature (3308)..(3308): n is a, c, g, or t
  misc_feature (3311)..(3311): n is a, c, g, or t
  misc_feature (3320)..(3320): n is a, c, g, or t
  misc_feature (3334)..(3334): n is a, c, g, or t
  misc_feature (4168)..(4168): n is a, c, g, or t
  misc_feature (4170)..(4170): n is a, c, g, or t
  misc_feature (4172)..(4172): n is a, c, g, or t
  misc_feature (4174)..(4174): n is a, c, g, or t
  misc_feature (4181)..(4182): n is a, c, g, or t
  misc_feature (4189)..(4189): n is a, c, g, or t
  misc_feature (4192)..(4192): n is a, c, g, or t
  misc_feature (4196)..(4196): n is a, c, g, or t
  misc_feature (4200)..(4200): n is a, c, g, or t
  misc_feature (4205)..(4205): n is a, c, g, or t
  misc_feature (4342)..(4342): n is a, c, g, or t
  misc_feature (4345)..(4346): n is a, c, g, or t
  misc_feature (4348)..(4348): n is a, c, g, or t
  misc_feature (4352)..(4352): n is a, c, g, or t
  misc_feature (4366)..(4366): n is a, c, g, or t
  misc_feature (4368)..(4368): n is a, c, g, or t
  misc_feature (4372)..(4372): n is a, c, g, or t
  misc_feature (4376)..(4376): n is a, c, g, or t
  misc_feature (4410)..(4410): n is a, c, g, or t
  misc_feature (4412)..(4412): n is a, c, g, or t
  misc_feature (4416)..(4416): n is a, c, g, or t
  misc_feature (4423)..(4423): n is a, c, g, or t
  misc_feature (4425)..(4425): n is a, c, g, or t
  misc_feature (4430)..(4432): n is a, c, g, or t
  misc_feature (4439)..(4439): n is a, c, g, or t
  misc_feature (4442)..(4443): n is a, c, g, or t
  misc_feature (4449)..(4449): n is a, c, g, or t
  misc_feature (4451)..(4451): n is a, c, g, or t
  misc_feature (4464)..(4464): n is a, c, g, or t
  misc_feature (4475)..(4475): n is a, c, g, or t
  misc_feature (4478)..(4479): n is a, c, g, or t
  misc_feature (4491)..(4491): n is a, c, g, or t
  misc_feature (4493)..(4493): n is a, c, g, or t
  misc_feature (4496)..(4496): n is a, c, g, or t
  misc_feature (4515)..(4515): n is a, c, g, or t
  misc_feature (4522)..(4522): n is a, c, g, or t
  misc_feature (4527)..(4527): n is a, c, g, or t
  misc_feature (4529)..(4529): n is a, c, g, or t
  misc_feature (4532)..(4532): n is a, c, g, or t
  misc_feature (4539)..(4539): n is a, c, g, or t
  misc_feature (4545)..(4545): n is a, c, g, or t
  misc_feature (4571)..(4571): n is a, c, g, or t
  misc_feature (4624)..(4624): n is a, c, g, or t
  misc_feature (4634)..(4634): n is a, c, g, or t
  misc_feature (4662)..(4662): n is a, c, g, or t
  misc_feature (4739)..(4739): n is a, c, g, or t
  misc_feature (4766)..(4766): n is a, c, g, or t
  misc_feature (5186)..(5186): n is a, c, g, or t
  misc_feature (6273)..(6273): n is a, c, g, or t
  misc_feature (6458)..(6458): n is a, c, g, or t
  misc_feature (6465)..(6465): n is a, c, g, or t
  misc_feature (6499)..(6499): n is a, c, g, or t
  misc_feature (6508)..(6508): n is a, c, g, or t
  misc_feature (6520)..(6520): n is a, c, g, or t
  misc_feature (6532)..(6532): n is a, c, g, or t
  misc_feature (7166)..(7166): n is a, c, g, or t
  misc_feature (7171)..(7171): n is a, c, g, or t
  misc_feature (7177)..(7178): n is a, c, g, or t
  misc_feature (7185)..(7185): n is a, c, g, or t
  misc_feature (7194)..(7194): n is a, c, g, or t
  misc_feature (7209)..(7209): n is a, c, g, or t
  misc_feature (7216)..(7217): n is a, c, g, or t
  misc_feature (7227)..(7227): n is a, c, g, or t
  misc_feature (7246)..(7246): n is a, c, g, or t
  misc_feature (7259)..(7260): n is a, c, g, or t
  misc_feature (7268)..(7268): n is a, c, g, or t
  misc_feature (7286)..(7287): n is a, c, g, or t
  misc_feature (7292)..(7292): n is a, c, g, or t
  misc_feature (7294)..(7294): n is a, c, g, or t
  misc_feature (7303)..(7303): n is a, c, g, or t
  misc_feature (7365)..(7365): n is a, c, g, or t
tctagacgtgtcctatagctcaaaaaatcagcgctatggaccacagcgcctaacagagtaaaataatacactgtgcagtttggccactaacagcaagagtgggaaggggcgaagaggaaccttgattgcccgacaccagggccacctgaaaagtcatcttgacacttcagtctttccattttgagatcggaagctttaaggaccattaaatcgctgccgctgccacaccaggcccgacggagcagaaaggctgcgctcacctgcggaagcgaccgggtgcacacctgccgggtggcgaggcccgcaccgtcacaccccgccccggcttacctgcccttcggtgatttttagcgtcaacttccatcccttcccacccatctggatccaaccaagcgcaagggcgggggagggagaagctagtgtcgcgaggaaaagcatccccgcaacccaccgcaggctttctctccttcctccccattccacacaagaggcaaagccacaccgcctctcctaaccctcgtctccaatgcaaggcctgaaatacttagaaaaaataataactgtttttaaggaaaagtaacatccccgctcccttccgcccctcaccttcacgaaagcaatcggggttgtggtaccttcgatatctaacaggatcacggtgacttcggcggggaccgaaagcacgaccatttccctaccggatgctacgggactcggcctgctgttggggagggcggagggcggcgccggctgcggctgcggcccccggtaccgtcttgggcttccggcggccccgcgcgatctcggagccagcgaccaagtgcagcccgccgcgcgtggggagaggacacttctgcacacctggaactggaaaaggcggccgcccaggagccctgaactcgtgagcaggacggggcaggagcccgagaccacgtgggcaggaaaaggggcggcccttgacgggttcggcggggcggggagggtgaaggcgccagcgccgattggccgccgtcaggcctcgaactggatccgtcaaaatgggcctcgcgtgggcgggaacaaagaagcgaacgcgggagcagggtgcgcgagagcgcgccctccgcagacaggttgagcgagcgggagaggcccggggcacgtgcagaaaggagccccgcgagtggcgcgccggggatgtgagtgccccttgccctctactgaatccagccccctccccgcccaccgcctccgcctttgcatagatacagtcatctggccagcccccgcccctcctcccggcgtcagcccgccagaggccgcgcggggcccgggcttcggccgatcagcccgggaggccccgccgcgcccccttggcccgcgcgcccgtggtcacagtggaagaggcgcccgcgctgcgctgcccggaggagccgtcgcgcgcccgcttcctgttcggctggttcctgccagctcgaggacaaaacacgcgtgcgcgcggcgggcgagcgcgctcgccgcctcagtcgccagcgccgggcgcagtccgcctttttccggagcagactggccgcggtgctagtcggtagcagcggccgccgcagcggctccgcactggcgaaccgagggcagaaaaaggcggggttgacggctttttggtaggagtgggctggaccggacgccagagacaaaggctcccaaggcaagagggactgtggccctgcgtcggctctgctcggaactgctgaccccaggaatttacgccccttcgtttttctcttctgattcttctcttctcccaagcccgcgtcccctcacgcgtggcctctctccttgccgggagggccgcgatggaggtcccgcccaggctttcccatgtgccgccgccattgttcccctccgctcccgctactttagcctcccgcagcctctcccattggcggccgcggccgccgcggcagctagccccgctcctcccttcgctcgctcccagctccgcccggcagggggcgcgccgggcccagcgccacgtcaccgcccagcagccctcccgattggcgggcggggcggctataaagggagggcgcaggcggcgcccggatctcttccgccgccattttaaatccagctccatacaacgctccgccgccgctgctgccgcgacccggactgcgcgccagcacccccctgccgacagctccgtcactatggaggatatgaacgagtacagcaatatagaggaattcgcagagggatccaagatcaacgcgagcaagaatcagcaggatgacgggtacgcacgcttcttcccccgctccccctcccccagcgcgccgcacgnccttcgttcctcgtgagccgcgcgctgcccccattctttctcagagtcgattccccgcgtgcntnctgggccccnactagantgnaggnaagagnanagtaagagatcgagggngtgactggagagacccggnaagagtngggnaaggncgnaggggttnnngnagnaggncgncgncgtctgtgtcccgagcgcgcaggcgncgcgtgggacccnnngggnangngccggcctcnccagcgctgcacgctgcagctgccgccgcctcttcattntntctctnttaccactctgcgcggtttncctgggaagagttttagaggactgagttggggcacaagcaggcgactggtacccagattcacaaaacgtgttatgattgatgagttctctgggtggaacgttggcttgacagctgagaacgaagatggacctaagtaagataagatgtgagggattcatctaggaagttgtgccttctacctaaaggaatctgggcagaacctttactgtattttattggtctcttttgagctttgctttatgtagtgcggacagtgagctgtccgctggtttgagtaacttcgttgggatattgggatttttgtgtgacatagattaaatgtaaacatgaattaaattgcctacacttagggggtaaatgtccctgtttttatttcacgatttaattccagaactgaaggatcatttgagttattgttaattttttttaaaaacacttttatttctagtaaaatgtttattggaggcttgagctgggatacaagcaaaaaagatctgacagagtacttgtctcgatttggggaagttgtagactgcacaattaaaacagatccagtcactgggagatcaagaggatttggatttgtgcttttcaaagatgctgctagtgttgataaggtaggnactatgttttgcattgtgctgcttcttgtngtgttttgcaaanttttctngnngntatatngtncttgtcaanattaaataaatctntctttgtaggttttggaactgaaagaacacaaactggatggcaaattgatagatcccaaaagggccaaagctttaaaagggaaagaacctcccaaaaaggtttttgtgggtggattgagcccggatacttctgaagaacaaattaaagaatattttggagcctttggagaggtgtgtgattatgtttacacatgttaagcttgatgtgtttataaaatgttcaatccttgtccgatttatgcagggcagattcatgtttcctgtaagagtagaattaaatgactgctcaagtcgcttccagtgactgtaccttgatttcattgctgctctgatggaaacccaactatctaatttagctaaaacatgggcacttaaatgtggtcagtgtttggacttgttaactagtggcatctttgggtacaaaataatattaatttctctcagtgcttcaaatatacaacaaatcactgtaggctgatgttgatcataaagcagtgatgtctgtatagaagtcacccgataagaataacatgtttaagttgaagcctgaaaaggcctttggcattctgacactgtaacgttttacaattatgggatgacgttgagtgtgcatctcgatttcagattgaaaatattgaacttcccatggatacaaaaacaaatgaaagaagaggattttgttttatcacatatactgatgaagagccagtaaaaaaattgttagaaagcagataccatcaaattggttctgggaaggtaaagccatttaagcactttaaatgaaaatttaaataattgaaataatttcttgatgtggagaaaaataaaatgatntnantntagaacnncggtaanaantatncttncatgntttttgtttatagtgtgaaatcaaagttgcacaacccaaagaggtatataggcagcaacagcaacaacaaaaaggtggaagaggtgctgcagctggtggacgaggtggtacgaggggtcgtggccgaggtgagactnaanncntganatatgactccgtgntntatntaangctgtatactgctgaatatgagtagtcctgtacnanagcnaaaactntnaaacnnnaaaaccnatnnccagcngnaggggggactgtncagcttagtgnagnntgtgtgtggtgntnttntgttgtgagctcactggtntcaaaanactgntnaanagtgtgnccactntgacaattagtgtcatcactgatagnaaaagtgtaccattacatgatacaccgtggtgtgataggttctcttgggcagnagtccttgtnttaaacagaacagtgtacctgtcttcgnctttaatggaaaattgaatgattttccattaagtttaggaagtttgatactggcacaattggactttctgcctcctnttttataacagctggaaaaatagtttntcaagcagatagcaatatatatgtccattctgccctttaagatttgcagagtgagagacaagaacgcatcattttatgttagaattgggggtcagaagttgtttcctaacaatcattgtgcattgtttcaggtcagggccaaaactggaaccaaggatttaataactattatgatcaaggatatggaaattacaatagtgcctatggtggtgatcaaaactatagtggctatggcggatatgattatactgggtataactatgggaactatggatatggacagggatatgcagactacagtggtaagaatatttaacttaattttataaagcagtggtattaaaattcattgttaacatacaatcctgttctgaaattgtgtgtatgggctttccattaaagtgttcggagttaagtgtntgaggcatgttacaatcataggatgattatactaacatagactggtggttataaatgaactaggatgtatgatttatgagtagcatctaatgggtgctaaaatatcttaatactttttatttagcatgcaaagcatttgtagatttaatagtttgtgtttgtaaagaaagttttgtagaaaactatcttaatgagaattctgtgttttcaaaataggccaacagagcacttatggcaaggcatctcgagggggtggcaatcaccaaaacaattaccagccatactaaaggagaacattggagaaaacaggtgtgtataagagtacaggaaaacagtagaaatgtctaatttaatttaaagatcaatagacaaatgaaacgtaaaaacaaaatactatgtagcctgtttttactaaattgttgattttttaattgctttatgagcctgttttgcctaaagtgtctatagatctttaactttaaagtcttatctcactttctttagtattgcagaaaaacttaagagtttttctgtttgcttttgtgtaccaggtggtctagaggaataattaaacattttagaactattaacaggtaaagtactgaaatgggtacaacttaaggaaaacaagaatgttgtcttctaactctgacattataccttgtttgtacccgccagcgggaacttcattgcaggccgtgtgtcaccctgaccacgtctatctctgggggtcgcacgttgcgggcagagcgcaaggcatacaccagaaaacgctgtcctgtggtatggtctcttccaacttcatgtaccagcgtaaagattaaagtggaaaacttcagactttggcttcatttttaatctttttggagattaagtgtctaaacttaacttaaatggttttttacaggagttaaagtacataaatgcctttttacagcttaatcattttggtcttctgtttagtgttgtatttcaattgtggagcctcattttaagtgttcattcttttaagatttaatgcttgctttttctttttatagctaatagtgaaatctacaaaccaaaacaagaacttttaaatctgggntataaattaaaggtcatatgcacagatcaatttatgttcttgtaataaacttattagaaattgggtgtttgtgatagcattttacttggggttactagagatgcttctagtagaccttaatctagcatagttgaacctctgaatatgggaaggttgagtttattgactacccaaactgtattttnccaatanatatgcatatgatctttaattattgaagaaaatnaagtgaggncttaaaacaatncatgaaagtggncctttaaaagcttgtcagagttgcacaaatctaactggtattttgtttttgtttttaggaggagatgttaaagtaacccatcttgcaggacgacattgaagattggtcttctgttgatctaagatgattattttgtaaaagactttctagtgtacaagacaccattgtgtccaactgtatatagctgccaattagttttctttgtttttactttgtcctttgctatctgtgttatgactcaatgtggatttgtttatacacattttatttgtatcatttcatgttaaacctcaaataaatgcttccttatgtgattgcttttctgcgtcaggtactacatagctctgtaaaaaatgtaatttaaaataagcaataattaaggcacagttgattttgtagagtattggtccatacagagaaactgtggtcctttataaatagccagccagcgtcaccctcttctccaatttgtaggtgtattttatgctcttaaggcttcatcttctccctgtaactgagatttctaccacacctttgaacaatgttctttcccttctggttatctgaagactgtcctgaaagaagacataagtgttgtgattagtagaagctttctagtagaccatatttcttntggantgtaannaaattgnttagtagcncctttttactttgtncctgtcnntggaaagccnatttttgaattgctgattnctttggctttaannagtggtcncctagaaaaagcttgtanncatancncatgagtantctgataaaagttcagatacaaaggagcactgtaaactgtagagctatgttaagagcattgnagtagtacaacccaagatttgtagaagtatgagttggcgaaattaaatagtgcaaatagatttagttgtgttttctcagagccgccacaagattgaacaaaatgttttctgtttgggcatcctgaggaagttgtattagctgttaatgctctgtgagtttagaaaaagtcttgatagtaaaatctagtttttgacacagtgcatgaactaagtagttaaatatttacatattcagaaaggaatagtggaaaaggtatcttggttatgacaaagtcattacaaatgtgactaagtcattacaaatgtgactgagtcattacagtggaccctctgggtgcattgaaaagaatccgttttatatccaggtttcagaggacctggaataataataagctttggattttgcattcagtgtagttggattttgggaccttggcctcagtgttatttactgggattggcatacgtgttcacaggcagagtagttgatctcacacaacgggtgatctcacaaaactggtaagtttcttatgctcatgagccctccctttttttttttaatttggtgcctgcaactttcttaacaatgattctacttcctgggctatcacattataatgctcttggcctcttttttgctgctgttttgctattcttaaacttaggccaagtaccaatgttggctgttagaagggattctgttcattcaacatgcaactttagggaatggaagtaagttcatttttaagttgtgttgtcagtaggtgcggtgtctagggtagtgaatcctgtaagttcaaatttatgattaggtgacgagttgacattgagattgtccttttccctgatcaaaaaatgaataaagcctttttaaacaaaatccaaacttttaatcaagtcttgatatgtatgactgagaaaaaatacactacatctaga

SEQ ID NO: 729 - DNA, 1641 bp, Homo sapiens
ccagcgaccgtcggtagcagcatggctctcctctttctcctaccccttgtcatgcagggcgtgagcagggctgagatgggcaccgcggatctggggccgtcctcagtgcctacaccaaccaatgttacaattgaatcctataacatgaaccctatcgtatattgggagtaccagatcatgccacaggtccctgtttttaccgtagagggaaagaactatggtgttaagaattcagaatggattgatgcctgcatcaatatttctcatcattattgtaatatttctgatcatgttggtgatccatcaaattctctttgggtcagagttaaagccagggttggacaaaaagaatctgcctatgcaaagtcagaagaatttgctgtatgccgagatggaaaaattggaccacctaaactggatatcagaaaggaggagaagcaaatcatgattgacatatttcacccttcagtttttgtaaatggagacgagcaggaagtcgattatgatcccgaaactacctgttacattagggtgtacaatgtgtatgtgagaatgaacggaagtgagatccagtataaaatactcacgcagaaggaagatgattgtgacgagattcagtgccagttagcgattccagtatcctcactgaattctcagtactgtgtttcagcagaaggagtcttacatgtgtggggtgttacaactgaaaagtcaaaagaagtttgtattaccattttcaatagcagtataaaaggttctctttggattccagttgttgctgctttactactctttctagtgcttagcctggtattcatctgtttttatattaagaaaattaatccattgaaggaaaaaagcataatattacccaagtccttgatctctgtggtaagaagtgctactttagagacaaaacctgaatcaaaatatgtatcactcatcacgtcataccagccattttccttagaaaaggaggtggtctgtgaagagccgttgtctccagcaacagttccaggcatgcataccgaagacaatccaggaaaagtggaacatacagaagaactttctagtataacagaagtggtgactactgaagaaaatattcctgacgtggtcccgggcagccatctgactccaatagagagagagagttcttcacctttaagtagtaaccagtctgaacctggcagcatcgctttaaactcgtatcactccagaaattgttctgagagtgatcactccagaaatggttttgatactgattccagctgtctggaatcacatagctccttatctgactcagaatttcccccaaataataaaggtgaaataaaaacagaaggacaagagctcataaccgtaataaaagcccccacctcctttggttatgataaaccacatgtgctagtggatctacttgtggatgatagcggtaaagagtccttgattggttatagaccaacagaagattccaaagaattttcatgagatcagctaagttgcaccaactttgaagtctgattttcctggacagttttctgctttaatttcatgaaaagattatgatctcagaaattgtatcttagttggtatcaaccaaatggagtgacttagtgtacatgaaagcgtaaagaggat

SEQ ID NO: 730 - DNA, 158661 bp, Homo sapiens
acagttcatgttgttaattctggaagcatgactgcaaactgaaaaatctgactccagtttagaattaaatcaaatcccattttgagatttgaggattaaataaataggttgtcatagtctctgctttttcagcattttctaaaccatgttgcttatcagaatcatctgggtctcttgctacaaatacagatcctcatgttgcaccctcaaaaatgtgactttgtaggccaggaatatcagctaaccataggtgattctgaagtagcttatcgatacaaccgtgtttaggaatcaatgttttaggccaatggttctaggaagaaatcaccaagcccttggtgaatgaacatttacactcacttcatgatcacataacagagagtttcctagggtatggtcctctttgggcaatacaaattgtgatacaatttctacttgtatcaactgcctatccttcccaaccaaaaaaaaagtgagaatcaacagtgttactcctcagtatcaagcaccaaaaaatagaatgcagcaaaatttgaaagggaaaagcagtcacttaaagcaaaccttttgtcagactccaatacatccagatcataaaaaatttaaaactgaaagaattcttagaccagctaattcaacctcataattttacagatgagagtcagagaaatgaagtcatatgatagtggcagagttgttacaaaacccaggacacaagtactcttacacttgtgtgtttttccactttaccatgtatttaatgaatccattatgaatattattggagttccttgagagcatgtatctctactacttagcacacttcctggcacatgatgcctgggtaaaagtttgttgaattgaatgctctgtttaaactccaagtagtaaaaattaaagtcatggtgatagcttctaaacatatttacctagaatgttggcctttctaatttgtcggagtaaagctgtgtgaataactctctcaataaatctgggacaactgaattatgttgccttaatgactgaaaaaaagagaagtcccttttgtgggatttactacgtaagtagtgacgttttccctattacatctctgcccccactcatccttgaagatgcagttcggctgtgaagtcagcttgctgtgaagtcagcttgctgtgaagtcagcttgctgtgaagtcagcttgctgtgaagtcagcttgctgtgaagtcagcttgctgtgaagtcagcttgcgcttggccacagaggaagctgcattgtattaatataaagggtactttggagacaaaacagagttgcatttgattttcagctttgctattaaggtacttaacctctttaaacctaagttttctcaccattgttcactatatccttagatatatctacaccatggacatgtctatggattgtttttaaaattctacttgttgctggaatttcaagaaatggacttcaagatgatactacccaggattgttggaatattcattgaaaccatgtatatttttcaaaaaacagaatgtaagaaatcttgcctgacatataaggggaactcaacaaatgcagtctccaagaggacaggaactttgttttgtgtactgttgtattagtgccttggacatagcagaaactcaacaaataatgctcatgtgtttcccttccttcctctgcctactttgttaataaaatatatttcatatcaactatcattgtatcatgcataaatattcttcacgtctcttaaatttgtgtgactttccattatacttagaaatttactgtcttcttacgaaaagtatttccatctctcaacaaagttaatgatctgcacagctgtgtcaagaagatgtagtaatgttcaatgtaggaagatgaacaatttgaaaaacacacacacattccctgatttcattcgtgtcacatatggactcatggctttcaaacactcaaacataacatgaaaaccattaccttcgcattcgagctacctgaagtttttgtttttttccttacagggaaccaccgcaagcacagatttgaaataaaattgagggcagtagtatcaggaaaaaaatcgttgggaatgtgttggagagagtaagggtccagcaggcagctgcgttctggctggacttgcagtcctacctccgtggccccaaactcgggggtgatttagagcaacgcctttgggccttactgttttagactatgggggtgcactccatcggtggttttcccccattattttaaccacagtctcctttctttcagagaagtgctccgtgtgaatctcgagctgggtgggaggagaaaaaagaaaaccaaagccaatctggtctccttgcatctcgaaaaaggtcacacgatccgtcgctttgccgccgctctccggagtcccgggccacgacctcgcattcagaagtcacgttcagcatctaaaggtagcggtcctcgagtccactccccgctggagtgaagagaacaacggggaggacgccttcccagagcagctgccgccggtccctgtccccggctcgcttcaagctctgcagctgctggggcatttctgatgagggccctgggaggtacactctgaaacattccgccccttgctagtatttactcactgtcttccaacctttttgctgtggaatgcgtgctccatgctccctgtccccatcttgggaggaggcaggaaccgagatgaaggaggagcgcagaagcaaacactttatgtgcccaactggaactgttcgctttggtcaaccaacactgattgctcattcctctgtgttccctcttaaacagcttctgaaaattgctcgagaggggcggagtcaggaagccaagagcgtgggaggcaaatctcagccccctcgctgtctgtgaggctagaagcctcggttttccttatctggaaaagggggttgctgataataataattacttcacaccattactgcgatgattaaatgcagtaatatatatctatcttagaatactgtttggtactgaggagtgttagcccttgtcattagtatgcattctgtcaacaaactgtaattgagcacaagctctgtgctaccctgaggagataagagtggtgaacaagactaataacgttcctgcccatatgaaatgtatatcctaatgatggtaaatgaaaaataagctagtaaacaataaaaacataattattttaattatcataagaaaataaaacaagaaaatatgtacagagtgaacatgtggcaagtggctaatgaaaagccagtggtcatggaaagtccatctgaggaggggcctgaataacaagaaagacatgcacacagatctgcaggttcagcattcagtgcagagtaaacagctgacgcaaaaactcaaaggtgagtgcatgcttggtctgttccaaggtgaaaatcatgcacttattacatgacaatgacttaaagatgtatttctatccctgcacatgtagggacaatttatatgggcatcttcattctcgccaagagttggagaacgggaaagatatgggaacctgtcccagctgttttctcattattaaagtgattgatgacaaagatcagtatatgcgcagagaaacagatccagcacctttcaccaacagataattcgttaaatgctgaaggatttttagccaaaatcctgaacaactggaaataagccaaggcggaaaaaaatctaatgccaagttacagacctttttcatgaggacaccagttttgtggtttaccattccattagagtatgcattcttttttaaaaacatttatttaatttttaaattttagattcaagtggtatgtgtgcaggtttgttacaagggtatattgcataatgctgactttgagctcctagtgaacccattgcccaaatagtgaacatagtacccaataaggtagtttttcaggggaaagaaactgctctattaaaaagaaaccttgcactcatatgtttattgcagcactattcacaatagtaaagtcatagaatcaacctaagtgcctatcaacggtggagtggatacagaaaatgtggaacatatacaccatggaatattaggcagtcataataaagaatgaaatcatgtccttggcagcaacatggatgcagctggaggccattattctaagtgaattaacatagaaatagaaaacataggccattattctaagtgaattagcaaagaaagtgaaattaacatagaaataatttctatgttaataggaattaacatagaaatagaaaatcaaatactacatgttctcacttataagtgagagctaaacagtgggtatacatggacattaagattgaaataagagtatggattattaatatcaatcaaagaagagaaccaacagatgggaataccctcattttatgcttagaactttgaactggaattgttcttaattttccatcaaaattttaagagaagataatttaaaaaactgtgctgtccttcagtttcatcattttatgtcttaaaactaatcactcaatatctgatagcaacagtatctatctcaaagtcattagtataccttggttattaagataattcaaattagcccttccagtgaagttgacatcatctttgctatttttagaaactttgaaacttaagaaaatgagttgcttcttcactgctacacttccactttctgcaccaagccttgggcttgcccttaggctttcctttttagaatgttcgttttctgtgaagcaggccttttctgttactctccatgcaatgcgttagttgtggctttaaagagaaaaattagctcccagtttctccagagctacaagttactcggtaagaaagagaagtcaaaaagtgaaatagtctcagaatttggagtttctatatgaatattccataggtttcttaaatattaggaaaagataaaaagacaagcagccaggggaggtgaaattggtaacagaatgagaggagcaaaacatgctaacttagtaaataaaacacttgaataactttgccacatcagagcaggtatttctatatctgcatgctcacgagtttttagaaaaggctaatgaaactgctctccagatgggagttgatgtcaagtcttatggcaagtgacaatgcttttggcattatcacaatatcatgtcacttcacctaaaaggtgaagaatctacaataactctgtttgctgaagatcttgaaagtaggaagtgaaatctgaatagagatacccatggggcacatctactacacctctgtaatctgcaaccaaaccagaggcattctctgacagaaaaatatttctttggacaaaaataaatatataaagagagttgggtcatcagccttcttttgccagagtgctgagaagaacaagaaatttaaataatctatatgaagaatttaaaatttcctttatatacacaatttaactgtgtgcatataaaattaacaaaaatgcactgatatctagcaggttgtttagggaatggctcctataattagagagaaaaacggcttgccagaacgtgaacactctattaccaatagctgcacatagtcattgaaggtttaaatcaaacacatctgtggcctttaaaaaaattttttgcctgccagcaccatggctacaagcagctattaaactgagatataataaataatcaaaatgtggatgctggaagtgcttgacacattatgagaagcagtgttcctatcacagatataaagaaatggcatgttcttgatgtaatgagaaatcttactactatgtggaacacagacacctcggaagtaattagctggggatggtggcacgtgcctgtagtcccagctactaggaaggttgaggcgggaagatcgcttgagcccaggagttcaaggctgcagtgagctgtgatcgtgccactgcactccagcctaggcaacagagccagacctcatctcaaaaaaaaagaaaaaaagaaaaaaaataattattcacaactgctttgcaaaagttcatgttagaaccacagatggctcagatgaacaaaggaagatatgtgacgactctaactggaataagctgcaaccaaaaatatgtcccatactcaaatgtcaattattttatagctattgataatgtgttagttccctctacggattgtgaatttcaaaagagaacaggtatccttgatgtaggtctgttttcagcatagtataagaggaagaaaagttgcctaagtccaaacatccaggagaaaagaagcatgaacagcaatggcaatcagtgatacactgcaatcatgtgattttgattcaaaagcaacagaatcactagatttgtttgtaaaccacaaaataacacatcacgtgaagctggaagccattatcctcaccaaactaatgcaggaacagaaaatcaaacactgcatgttctcacttgtaagtgggagctaaacaatgcgaacacatagacacagggaagagaacaacacacactggggcctgtcggggtggggttgggggagggagagcatcaggaaaaatagctaatgcatgctgggctttaatacctaggtgatgggttgataggtgcagcaaattaccatggcacacatttacctgtataacaaacctgcacatcctacacatgtaccccagaacttataataaaataaaaataagtaggatagaggacaaactgctaaatctaagatgcatatttgcagcactgcctagcatagtaataatttagaacatctggcagccctttaaaagtcaacagactgctttcatctctgttatctcatctgatcgtgctagggcttggtggatagaattatctccattttacaggggagaaaactaaggctccaagatttagtaacttacttcagtcccatcaagggagaactggatcagattcctgatccaattgccaggaggcaaaccctgatccaattgccaggatccaatcttgatccaattgccaggaggcaaatatttctgctgtcccactggaatatagggctttcctggcctgcccttctagggtctgcatttgccagccctaggatgaacacttatacaggagctatttctaaatgtctagatagccatgtttatcagtgccccaccattcactatggtaaccctagatgctgaaaataaccatattaaggaaattagcctgtgtacattcactctcgtcatcatcttggttttggtgggttttggctggcttctttactgcagtctgttttatcagcaagatctttatgacctgtatcttgtgctgacctcctatctcatcctgcgacttagaatgccttaactgtctgggaatgcagcccagtaggtctcagccttattttacccagctcctattcaagacaaagttgttctggttcacatacctctgacagggaggcctcaggaaacttacaatcatggtggaaggcaaacgggaagcaggcacatcttacatggccagataattacactacaaattttagggtataaataagattactttaggagagaatatggagtaagagggggctttgctagagtcctgaaagctctaaagagaggcgatatttagagttcacacagcttagtaactcagatctctctgactctaaaactcattctttttctaggatactatgctgcctcttaaagaatagatattgaatacaatataattaagttgatattaataccaaatgcgaacctttgcaaaggggagataaagcaaggggaatgattaagatcaccaggaagagtgtgaagagtaagaagagaagatggcatagggcagaaccctatggaatgtgaacatttctaaagaaaatgaagagctgccacagaggtgggaggagaaccagcagggtgtagttcttggaaagagctaacagaataaaggggttcaaaaaggagggaataagggccgtgtgtggtggctcatgcctgtaatcccaatactttggaagactgaggcgggtcgattatgaggtcaggagttcgagaccagcctggccaatatggtgaaaccccgtctctactaaaaatataaaaaattagctgcctgtggtggcgcacgcctgtagtcccaactgcttgggagactgaggcaggagaatcgcttgaacccgggagacggagctggcagtgagccgagatcgcggcactgcactccagcctgggcaacagagtgagattccatctcaaaaaaaaaaaaaaaaaaaaaaggaataatgaaactaaagtcctgcagagttgaaatacggtaatggcttaaaagtatctatttgttttagcaacactgttgagaattctgtctgtaaaggagaggtgagagaaagaccactagcttatctgtgtttggtctgtgtttgatgagggggcttggggtatggggttaagaaaggtgactttggaatgttttagatgagagaaattttgacagcctttaagtcctgatagtaaagagcgagttagcagagagccgttgaggagtcatgcaacggaagggttcatcagaggagcttgactctgagtcggcaacagggaatagagatggaagagggctggcttagatcaaaggagagtagtcgtttattattattattattgcaaaaagaataggagaaaggattggtgaggggtacaagaaaattagaaaatttcatggcgaaagtagaggcagttcctgtcagatgaattctattttgtctgtgaggaaacgggcgacgctgcctactgagactaagcaggagagacggggcaagcttggctcttcatttatgccgcctactcattgctggtagattctttatctagcctgcatcctctcattttcctggatccctatacggcatttgacgctgtttaccacaagagctgtcgaacgaacgtgaaacactcagtgatactccaaccggaactactactcccagaatgcagtacggctcctgggaagtgcggggggctgggaacgcagcaggcctagccgtgtcgcctgctgccattggaggagcgctcccactcccaagaggccacgcgtagacggggcgcttcatgcggaagtcagcggcgtccggtcccagcctcctctgggagcgggcagttggcgaccctgcactgacccgcgtccctccgtcccgagcccgcgcgccctcagagggtgcccggacaggtaaatggagtggggtgcgcctgcgggaggcggggagagaactgcggagggagggcggaggtgtcgatggaaaggtgctggggtggagcgaggaggcagtgcaggggtgacttgggcttctctggtgtcgacagttccagttgtcgggcaggaccagttttggcgaggtgcgtcttatgccactggaaaggcctcgagttaaagagtgtcagaatgcgtcacttaagctgtcattacaggagggaaaaaatgttaactttctctcagtttgtattctacaagacctttctgtagcatttaaatctcttgagatcgccagagtcttctaaaaactctctacgtccttgttcgatgacgtcactttctgcttcaccttctacttctggctgtttatgctccttcgtgggttcctagccccttattcgcccttcctccactgctcagtattgacagtccccttcttcctctgttcagggactgtatttctgcctagacccgtttcctcagcttcagacctgtttggtgtttttattaatggccaatgtttatcaaattctgactgcgtactttggtaaatgctttacatctccgtctcccataactctcacaaccaaccaactgtcttcatttggcctcattaattgctttcaactacctgtatctccattatccctcccttgatcccagaggatacagtcatgtttaggatattaattccctttgaatacctgtggctgagagcagatccattcatacatttaacaaatatttattgaacggctggtatatgcttgacactcttttaagtgcaggggatacagctgtaaacaagacttaggaggttgctactctcaggaacttacatgtttgtgtctagaggggaaaacaggaataatcaggattatgttatatattggttaatgcaaaataaaacaggtggttgacttgaaaggatgggatcctatcctaagaaagtcagaggtcagggcatcgtccagaaagaatagttgtaataccaacaggaataatcttgatctgtaacatgacttttcgtaaacacctcttcttttcccctgtctaagcagtgtttattcttcattcttctatctcctccaaggttattgcatcagaattcatggtttatctgtagttggtttattccttctaagacccagagagaagagtgggggattggattactattagctcaactgctttatcttacttagaaagatagtttggttgtgaaaatattattcttaccaggtccttctgaatataaagttatctaccatttatagtatattttaaaaccaaaatatgctcaatgttcactcatttattcaacagatatttgagggaatattagatggtaggcactgtgctgagcactgggaaaatagggtaaaatagacactttgacctctcttccaaggagaaataatcctaacagtatactgaggaaatttctaaggcataggctgacacctgcattcctgttcttcatccgaggtgagatcatcacaaaacattaagacatttcctgagcaattgcggacattcttagattattcacttattatactttattgcatttatttatatctgtcttccccattgttctatggctccctcaagtataggagtcccttcttccttaactttatacctctagtgtctactttgactgtcatatagtaacccaccagtatatacgtgttgaactgaaatagactccctatttgatcaaatttaaatgacatgatttatacaaggccttctttatgtaaggccatcagccgtattcctcaaccttctcattcaccaaaggtggaccattccatcttatcaggctagcttatgtaccttctttaccttgctctcagtgccttctcttcttccatccatccctcctaaaaggatctcccatctcttcccaagcaccttgtgtacctccctccattaatttggtgggccagttaatttaataatctgctcatgatacaggggtggaaaaaaattaatttcctttttatatttcctatgaaacattctgccaatgaactcttgcaagaattaatgtaatagatcctactgcaataatataatgatacagaatactttttaaagattttgcattgactatcaccatgtgctatgtaatgagttaattctactactttatttgaacagttgtataacctctgttcacacagcatgttttggtatcatttggtttctacttggtagaaacacatctttttttttttttttttttttgagacggagtctcactccgttgcctgggctggagtgcagcggcgcgatctcggctcactgcaacctccgcctcccaggttcaagcaattctcctgcctcagccccctgagtagctgggattacaggtgcacaccaccacgcctgactaatttttttttgtatttttagtagagacgggatttcaccatttttggtcaggctggtctcgaactcctgacctcaggtgatccacctcggcctcccaaagtgctgggattacaggcatgagccaccatgcccggccaagaaacacatctttgagtattactttctcagcctgaggtaatttaagtggtaatgttattctgccacattgtcattttcaggatgtcagataaaagcctcaagtattaaaattaaacttttttttttcttttgagacagagttttgctcttgttacccaggctggagtgcaatggcatgatcttggctcacctcagcctccacttcccgggttcaagcgattctcctgcctcagcctcccaagtagctggaattacaggcgtgcgccaccacgcctggctaattttgtatttttagtagaaacggggtttctccatgttggtcaggctggtctcgaactcctgaccttgggtgatccgcccgcctcagcctcccaaagtgctgggattacaggcatgaaccactgcgcccagccaaaattaaagtcttattccatgcaggtatctttcaattgtaaatcattactgcaaaagacaaattttgtctttataactgattaaaaacaacagcagtacaagagtgcttgagtcatgactgtcgtgaatttaggatgtgccaacctaagatcagccagatacttctaagatgtaaacattaagcattgttattttaggtgatttattgacacctatttctttatagacaggaatgcaagtgcagcactgaattgtgtgccattgctcgtttataagatacacatgtagatgatccagaatattcttatacatttttcagtgttatcaaaatacaaatgcagaattaaaagatttctcaaaacacatggacttggcctttccccttactcagttacctgaaactgtcttcagcctctacttgaagatgcttctgctgaggaggagcattttcatcattgctgttctatgttattaccaaattttttaatacaggcaatttcttacttacaaatggatatattctaaaagtactgttgtaagcttattgtttggaacgctggatgcatttccttctataaataatgctatccatgacatttacactgttatgccaaccagtatcattttattaacttttaatttagtggactcgaagaccttccccacaatttacaataattcctctattaaaaaactgcatttataattctcatttgaattcccttatagcatatctttttttagaaacccaacaactagaacaaaaatatcctttctttagtcccttaacatagtaaaaacaggcttttctaactccaaactgttgtgggtgacccttctagcccttagctctaaggacagtcctccaatatgagcaaggaaaacgaagggacagaggttttagagagggaggcaagttgggtgatatgagtatctggaaagggaagggtaggatttatttgggatgaacagtgagtttctaaaatggaagtttgcattgcttgtcagccttttggctaagatcaggtgtagtatcagtttaaaatgggggtttgttgtgggttgaattgtgtcctccagaaagctgtgttgaagtcctaacccgtggtacctgtgaatgggatcttatttagaaataggatctttgcagatgtaattaagatgtaattgaaaatggggtcatactggagtagagtgggccctttatccaatatgactggcatccatataaaagaagagagacagagagaatgcagtgtgaagacacagatacagagaacaccatgtgactacagaggtaaagattgaagtgctgcacctccaagccaaggaacaccaaggattgccaccaaactatcagaagctagaaagagataaggaaagattctcttctacaggtttcagagggagcataaccctgccaacatcttgattttggacttttaaccctcagaactggtaggcgatacatttctgttgttttaagcaaccaagtttttggtactttattactgcagctacaagaaactaatacaggattcttagcaggaataaagtagaattgggatggtggctgtgggaccaagtggggagtgaataggagaacaaagaggaacagtgttgatatggggctttcctttatgttgcattatctttttttcttcccttctctctctggcttatcttttcattctttttcttcttggatcttatctttatatagcactttatggtttattaggcatttacatactgctaataattagcagagccaggttttctaacttcaagtgcagtgttcattgtgccacaattgtttctgttatcccaatactcatcaagacgttatggattctattacaagacacttacaatgggggcaggtaagacttcataggtgggatttttagcagtatagcagagaggaaggaattcctattagtgacatctggaaggaaagtaaagtttctgttgctatgtacccactgtttaacagtcatttttaagttggggactgcttttattggaagaaacactacttgcgtataacttatattcattgttcctagttatattctgaataatgtgctccctgttccaggtgactgtactttatataaactcaaaaactattgtcatgttccctctaagtcctctctttctcatgttacatatctctagttcctccagccagtcttcagatgacacaatctccatgtctctcacccatattgtattgcctcccttttgtctagtcgttaaatattctacccagaattgaattcagtattttacatatgttctaaccagcacagagtgtaatgggactagtacttaaacaggtcaagacaccctatttcttaatgtactttgagattatgtaagcatttttaagcaatatcgcataccgttggttcataatgaacttacagtccactgaaacactagatctttttgtattaattgttgccaaggtcaagtttccttctgaacctgcacagggactgaggctgctgctactttttcatctctctgttccagggaccatatgatttcttatctctgtttctctttgtgtttttgttcctctctactgtgtctctttgaccctaagcaatgacctccttccttgttataaaatttcactgattgttttacagtcttcattctctttctttcctttcggcttctgggccaccacacttttggctttcccatttggtcctcctcagtctttgtgagtctctatttatctacctttccctcaactgttggttgtgctttgggttttatctttggcactattttttttttctgtatgcaatatatcttcagcaaataaatcatgtttaaaatggcagatctaactgagctcatctgggaataaaagggcacagaatcagtcccggaggaaagtcgacatttagaggtcaggtagaggaggaagagtcagcaagaagacaaaaagagcagccagagatgtaggagcatttcaagaaggagggtcggtcagcagtgttgactgtgcctaagaggtcaagtaaggtaagaatagagaagcaaccactgtattttgcaatatagaggctgttggtgaccttaggaagcatggttttctggagttttaagggcaaaagctggattatagtaagtagaagagttgaaaggaggcagaggagcagagataatgcgtaacgatgctttgaagaaacagaacagggccaggtacggtggctcatgcctgtaatcccagcactttgggaggccaaggcaggtggatcacttgagcccgggagttcaagaccagcctgggtgacatggtgaaaccctgtctgtacaaaaaaaaatacaaaaatagccggacatggtggcacacacctgtagtcccagatactccagaggctgaggtaggaggatcacttgagcctgataagtggaggctgtagtgagccaagattgtgccactgcactctagcctggagcttgggtgacagagcaagaccctgtctcaaaaaaaaaaaaaaaagaaaagaaacagaacagtaggatccacagttagggaggctttaggatcaagggagataaagtataagacagcaatttggaaactataacttactgcatatgtgtaaggagaattctagaaagaagatggttgagatcacaaccctggggaacaacttcagttagagagtaggaatgaaaaagagatccccaaaaggcattcagcccaagagacagatgagcaccttctgctctgtgtgctgtccttccatgctgggattgcaataaggaatctgcacattccttgatctcaaacagtttatagtttgctgttgtgtttcacaaagtatgtttgtgtgaatcacctgcatccagacagacttgtattaaatacagattccagggccctacctcaggcctacggaatcagaatttcaggaagtgatgccaagagtttgaatttttagcaaatgactcatactctgccacacaagatgattcgtattcccactacagtttgagaaccactggtatgttgggtactgagcatgttaacaaataagagtaggtttaacagttaatcgaagactagacaaggatttgttcatctctttttatgtttatgccattaaataagagaagctgggcttgttaggtgggaaataatagcacatattcataggcagacataaggaaaataatcttaaactcatgccatatggttttagtaatgttttgtttatgaagggtcttaccattcctttcttgtggaagctttgagttattttcactttgtttctgttatggataatgcctttatactggcagtgtacagtaaaaggctaagattatgagctctagaaccatactgcctaggtttaaattgcagctccacacttactagctctgtaatttgggggaaattatttaagtcatctgtgcttcagttttctcatctataatagaagtatcataatagtgtataatctcattgagttgtgaggattaaatggattaataattataaagtatttaaaatggtacctggcacatagtaaacaataaatataggctatttttattgttaatagttatctttgtgaatctagagtcttaacttctgttgaactatttctctaggataaattttcaggatggaatttctacattaaagaatgaagacatctttatgtccctttgctatctatagtcattgcttttcaaaagggtgatatctgtttgtgctataataatttgtaaatgcaagctatcaatggtgtgtgtgtgtgtgtatgtgttttgtatgtctctttatatgaatgcatacaagcatggcttaggttgtaagtttgtagaaaactttgaccttctttttaagcctgctcttaagtctgttgttaagtttcatgttatagtgcctcgttagatactatctccaggtagtatgttgataaatgatagtaagttacctttgaaagattatgtcaaagaaatattctaaatctgtgtctttttccttttgatagactgaagccatggcgattctttttgctgttgttgccagggggaccactatccttgccaaacatgcttggtgtggaggaaacttcctggaggtgacagagcagattctggctaagataccttctgaaaataacaaactaacgtactcacatggcaagtgagttctgttctgcatgtggtaagggatgaaagaagggaattctgttactctaatcagaacggtagaaaagtagaaaacaagcttctaggtacataatttgaataagctgacagaatagtaaccttcaccaacttagaaaatatatctggttttgttacttataaatttaacttgtaattattttattctattattgaagtgatattttattttgaagaaagatgaaatgttaaatgtaaaaatgactttgctctagagctgtgtgatatgtgaaaataattcagataagatagataatgttcctttgttcattctttcagtaaatatttactgagcacttaactattgccaggcactttgcttggtgctggggatataacaagatatgtggtatttgccctcataagggttatagtttaatgagggagaaagtcaaatccacgatgtcaagggttggggggatgggaagtagtagataggagaatggtattccaagtagaaggaacagcaggtagagaagtatggaggcatgagatcatagggcgggcatatttagggaactgcagactgttctctgtgactggtgcccaggatggtgaaaataaagctagagagatgggtagaagaaaagtcatgtagggccttgtaggccatattaagagcttggactttaccttgtgggcagtggaaaggcattgaaggttttcagccagggtgtgacagagtcaggtttgttttatttatttatttatttatttatttagaaacagagtctcactctgtcacccaggctggagtgcagtggtgcgatcttggctcactgcaacctccatctcccaggttcagatgattctcgtgccttagcctcctgagtagctgggattacaggcgtgcaccaccatgcccagctaatttttgtatttttagtagagttggggtttcaccatgttggccaggcttgtctcaagctcctgacctcaggtgattcgcctgccttggcctcccaaagcgttgggattacaggcgtgagccactgcccctggcccttcagtcagtttttgctttagaaagatcactctggtggcttattagagtggccatagttgggaaatcttagtaattagttttaaaaagtgcctcaaccttccccgttggcacttaaaaatcttttcttacttaacccagccttacttccttagttcttatctcagaatgaggtccttattactttctatggctaaccccttatacagtttaaggtgtactctaagctactatgagagagacccccaagatacagtattaattttaatgagatagtccagagatgagtggtttgggatgttggggtggctctgccatttccaattccctaattcccaaagcaattagtgctttccacttctggccaaggcagctcctttggtgcttgttatatcccagtgcttgcccagtaattttaaaggcagggcccagaagtggcctgatattgttgagaagcttccacttacatcttactgttcactacacagtcatgtagctagcatagctagaagggaggccaggaattgtcatctctggctatgtagtcgtaggctcaactaaaactctgttactctggaggaagttataggatatcaggggatgacttgcagtcttccagtctactctcctggccacccagatatttcagtgaacctttcttcccaaacatagaatacgcctcttctctgagagaggtagctccaaagacctatctagtcactgtgtttggctccaagtccagcatgtctaggtggtacacagtcctatccatcaggccctggtgtggctcctgtggtccactgaccataaagtaaaagataagtcatatgttttccctgctttcccagcctaacccagtagacaatggtgaaataagaaaaggatcatcacagtgagagttacaaactcccatttggaaaagggaagaatgagaaacatgtagaagtcattgctttccagtaatgatcaaataattgcctcacacaatttcaaagactccctattctgaccaggaagtggttagtggttctgctttcttggaggaactccctcaccctttttccctgactcctggctttgttctccaggaagtttttcctttctggccacatccaaaatggtagttagagagtatatcatctttgggaattgtacccattttgtagtcctcttgctgccagcgtaggtttgtgggcctagaggttaggggttaaataatcttagcttcttatgattttggctttatactttctctaaaaatgtattagacttacagtctttgtgtttctaggcagttcctgggaaaatgtccagggaaagcacatgtagtcgtccttttagaggcaagactgggaaatagggcatatatcttccactcatgtattatgagccagaatttagtcacagccatatgtagctttaagagagtatagaatatgtaatccaattaaaatgcagttatagtagaaggagatgttatctgtctgccatgcctctctgcctgtgtctctgatctagctgtgttatttcgagctttggtacctttttttcatgcttttgttatcttctaggaatgctgttctccccctaagcctccttgtaaacttttgctcactttacaggtcccaagcgaaatactttcttaatttgtactttaatgcttctaaaagggcagttctgatcatattccttccttcaacagatactgtctgccctcaaggtaaaattccttaacgggacttggaatattcttcaagatctgccactttttccttctgtgggctcatcttttactactttagtcctcagttttgctttccagccatacttcatacttagccatttacaattcaatgctaggttctttctctcttcctagcctttgcaatagctgttaccttttactggaatatatttatctacttaattttttaaaaatctcactttgtgtgcctgagcttagatgtttccttttccagaaacccctgaacattaacactgagtcaggcaccgcaatcagacactctttttatgtgtctacatagcatctagtttgttcatattgtaacacttttcacactgtattattattattattattattattattgagacgaagtttcgcttttgttgcccaggctggagtgcaatggcgcaatctcagctcaccgcaacctccacttcctgggttcaagtgattatcctgcctcagcctcccgagtaactgggatgacaggcgtgtgccaccacgcctggctaatttttgtatttttagtagagatggggtttcaccatgttggccaggcaggtctcgaactcctgacctcaggcaatccgcccgcctcggcctcccaaagtgctgggattacaggcatgagccaccgtgcctggcctcagactgtattataattgaaatgattgtttatttctgtaccctgactgtaggcttcttgatggcagggatcataccttgttaccttttgtggcctgtgcaccaagtgacttacaagtctggtttaggagaaacaaattttatggggaaagtgatgactttcattctgggcatgtcatgtttaagctgtctatggtatgtccagttggatatgtctagtagacagtagtgtaggtagtcctggagctcaggagataggtcagatggagatttgggaatcattggcataattgtggtagctgaaaacaaactacaacaaaacatgagagtgcatgctgccctccagggagtaagtaagtgtgaaaaaagcaggaggctaaggaagctagaaaacgttagtgtagagggaaagggactatgatataaaccaggtatattagcctgcttgggctgctataacaaaataccatagactgagtggcttgaacaacagatacttgtttctcacagttctggagactgcgtgaggtgcccgctaattcagttcttgatgagggccttcttcctggctggcagatggccaccttcttgctgtgttctcaggtggtggaaagagagtgatctttttcttcctcttttttaaagccactaatcccatcacgaggaccccaccctcatgacctcatctaatcttaagtgcctcccaaaggccttgtctccaaatatagtcacactgtaacatatgaattttgaaaggacacagttcagtctatagcaccaggcaagcctgatgtcaagaaatctagtgaagataaaacactttccaaaaggaagtggtcaacactatcatatgtttcagagagagccactggatatggcaatgtggaagtcattggtggaaatggtgcaaatagttttagagtattggaggaaaagattttgcctgagttcctgtatctccttgtaattcatgtcagtcctctgtgaacattaatataattcaacaggtacccctatctatccacttgcccaaggtacaaatgtgggaggcaaaatttagttaacctgtctcacgccagtcaccaagttctataaatgctgcctcctatctcttctctgtccctttttctttattacccattctactttagtttatttccctcctcatttcttacccggtatactgcagtagtctcctgtctggtcctcctttgagtcagttttccgcactctagccaatgtgtcctttgttttttttttttttttttttttaatgtgtcctttttaaagtgcaaatctgatcacaccctccctaggctaaaacttttggatgtttattcattattcttaggataatgcacagtgtggtttataaagtcttgtataacctggtttttgcttacttctccagtcttgtctgtccagataattcactttttcttcacattctgtactctagtcatgtgagccaattttactttcctaaatctattaggtgctgttttacctctaggcccttatgcttgctgcttcctctctggaaaaactctttgctcacttttttttgttgttgttgttttttgaaacaaggtctcactttgttacccaggctggagtgcagtggcgcaatctcagcttactacagcctcaacctcctgggttccagcgatcctcctgcctcagcctcccaagtagctgggactataggcgtgtgccaccacacctggctaatttttgtattttgtgtacagacggggttttgccatgttgcccaggctggtcttgaactcctgagctcaagcgatctgcccgcctcagcctcccaaagtgctaggattacaggcatgagccagccaccacgcctggcctttcgctcactctttaccttgccatctgttacttattcttcaggtcttaaatcagacatcacttgttctgggaagtctttctggttaccctttggcaaatctccatttcgtgcctcatctattaatgtgtccccagagcaccatgtactgcctttaactttcctgtcatcctgtttgccatgctgcactgtaattccttacactgtgatccctatgaagactgggacttggtggttttgcttttttgtatcctcagcatccagcacagtaactaactcaaagtggatactcaaatgttgagaatttggtagaaaagatgtttgctttaagaacttaggaaaaagcaaagaaaaccatatggcctattgggggttaatcttaattacatcctcctcctaagatgtcatctcttgttcatgctttaagagtccaattatgcttttgcagctatcgttctaatgggtaatacacatgctgttgtgctatgtagctagaatagagatctttttatttcttatgtacttctatcagtttgacttgaaagaaacaggtatattgggaaggggaagagggagaagagactgtatccgtaagtaatatggtgacattggcagtactgaacgtgcttatacatagatagaagatagaagtaaaagtgatgttgcttataaccacagtaagttttatatcttttattctacagttatttgtttcattacatctgccaagacaggattgtatatctttgtatcactgatgatgtaagtaacttgaagacatattgctatttaactatgtgtactgttaatacagccagttcttaattatctataccaggggtccccaacccccagggctgcagaccggtacaggtctgtggcttgttaggaaccaggccacatagcaggaggtgagtggcctatgagcattaccacctgagttctgcctcctgtcagatcagcagcagcattagattctcatatgagtgtgaaccctgttgtgaactctgcatccgagggatctaaattgcatgctccttaggagaatctaatgcctgatgatctgaggtggaacagtttaatcccgaaaccattcaccctcccccagtccttggaaaaattgtcttctacaaaaccggtccctggtgccaaaaaggttggggactgctgatctgtacctatagtgggcaaacgtgatgcgaactttacatagctggaattgttaatattttgcatttgtcatatagagcagcaaatgttaagaaaacttgatactggggtatgtgcaaatcaactcaattttggtagagttttagcttagcctcttgcaacttctatatttattctattttgtagtgagaattgatgttcataattataattctttgatatcaaaacctctcaaaaattgtttacgtggaatgttaaattagatagcatcatttcttctatcagtagttaatgaatcctttaatgtatgtgaactttggaaaaacaaaattacaatacattatgatcagctatataaacctgtagtttacattggttaggtatgactgtttgtcggctctcagcccaaaattctcagtaacttaatgatgtcattaaggtcctttctcttctctgcttatctccgtgtctccttcttcccagacaggttgccattatggtttcgtagagctacatacttatttattcatgtccggagtagagggactgtgtcttcttgagtgtcttattgtaggaatgaggaagcttttcccagctgcatgccctcccctccccctgctttcaaagtgaacttcctttcatgtcttattggctgcatgctcatttctaaactgcctactggcaaagagacttggaattggcatggttgccatagatcagggttcctaatctttattgtatcacagactcgtcacttgtgggacactcccagaatgtttttgttttctttttttaattttccttttccagaatgcttttaaatgtataaaacacacacaattctaacaaagccaattatattgaaatatatatatatatagtattcaaaatattttaaaaacttgatgtagtaatatatatgcttctttatgaactcattaacaagatctagtcataggtctaataactaatagtcttgatgtgatgggtgttgacagtattttgagatatctgtaactgtgatggtatacaaaaaaagatttctgttggtgacagttacaggtactgtttaatactaccccgattatgaatatacaacctatattcacaattgaaatataagttaacgattgataaaaataatgatgtgattttctttttttctatccaagttcaaaggccccttgaatttggaccattgaccccaatttaagaacccttggcttagactaagcatcttgggtgaaagggaaatgactgtcaaccatagtgatcatcacaatgatttttatctctggcttcacaatattttccaaaagtacgaaaaaatctagctatatgtgaaatgactgatgtgaaacagcttggaatagaaggaaaatactaatgaaatctgggatagttagagtcgagcctcatatttcttgagctataatttgatacacacatatacatgtatacataaacacacatacacacattcatttttttcctctaaggtattcttacagagaacacacatactttttggctggctgggattagacatgagtatgtcacttgatcttttcaaatataccaccactattgaaaaaattcgatttgaagttaatatcagtagtagtatctgtatgtgtgaaagactctatgattattatgggatttattaaacatattcttgtgctgggccttctaatagatcttatgaaatatatggaggaagtaaaattcaattcctgatgtcaagaagttgataacctaggtatcattatcttcagttgtcaatgaccagatatatctggattcattctcagctctttcatttactagttgttggacctttggacaagttagttactttttcagagccttcctttacttatctttaagataggatcaatgctagttcctcctcagataatcattgctcagtaaatgttagctgttttttattgttgttcttaatcactcacatcatctttgtttactttctaaatgtgagttctgtgttgatctcttttcaggattttgaacgttcccgagcctttaattttctgaatgagataaagaagaggttccagactacttacggttcaagagcacagacagcacttccatatgccatgaatagcgagttctcaagtgtcttagctgcacagctggtaagatctttctcaggataaggtattttgatttatatcttcttcattaccttcaaacactatgaatctagggggccctgacctgcaatatagttttctgattgtgttactgtaagccaacataataaaacttccctgattaaaaaaaaaatgtaaaggggccattttagggtagaaaacagtgatagtctttattatctctattaatagtggtcacagtgtctcatgattggaagagcattaaagatcatctagttgaactacccatctgatgcttaaatgtgttcagcatgccaaatgatcttttaaactatacgtaaaccttctacccttccatgagggaaatttaattttctaacaacccaaattaataatttgaaactctcctcatctgtatgaatccctaattgtcagcttagtgaggttttacatgtgaatatacctgtgaaataccactgtacttaagacagcattttaatcaccctaaaagttccctcatatcccttaccagttggtcccctcccctacactttgccccaggcaaccacggatctgttttctatcactataaattagttttgtctttcatagaactttctgtaaatagaatcatacagtatgtaaactttctgtaaatggaatcatacagtatgtacttttttgtgtcttgcttgtttcagtcagtgtaaggctcttgatattcttccatgttgtataaatcagtagtttgttcccctttttgctaagtagtagtatatgcatataccacaatttgtttatccatccacctgttgctggatatttgggttgcttccagttttcagctatcatgaataaagctgctgttaacctccatgtataagtctttgtgtggacatatgtttttatttctctctgataaatacctaggaatggaattgctgggtcatatggtaggtgatgtgtaattgaaaaaaaaaaatcaccacttttttttccaaagtggttgtaccattttatattctcaccagcagttccagtgtctctgcgtccttgccagtacttgatgtggtcttaagttttgccattccagttgatgtgtaatggtatctcattgtggttttaatttatgttttcatgatgtcagacacctttcgaaatgcttcccttttatccatgaaactatttgagtataaagacgtaagctctagctatgattttgttgtgagtttaaaaaaaagctgtattgtaatggaatactttcacttctcctgtggttttaatactctgagtattacatttctaaattttatgcacacacacacacacgcacacacatactcttctggcaataaagtccctttaaattggttacttataaacctttattattcaagcagttggtttgtttcatactccccactaggaaatgttcatctgtgtaaaactgtgtaaaacactacccacaacaaaaataccagtacttagtcaaaagtaaagggtcagctagaaacaaaactttcaaattaaccaatttgtcattagctctagatctgtgtgaccttctgaacaaaatctctacctgttcctttgtctgtaaatagagataatagcatcgtttcatagagttttggggtggattaaataatatcccgtttgaagcacttaacacaatgaaatgactggaacattgtgtattaagcaccccataattgctagctatggataaataatttcaaactatatattatcagtgtcttagattctagatcctgtgagaagccaataaaaatagtttatatgctgtgatcctggcagatacaagaacagattctgagaagctgggccagcccctacctcatcatactcaagaagtggggaacaattttgcagcattctttcccccactgccccaactacagtcttctttttctcctttcttccttgtctgagcacagattatatatcccccccaatctctgccccacaagtcacatgtatatttgatataatgtttatttttattttatttaaaataaggtaatttttagactacatacttatagtttgtatagaagcattttttatgctgcccatattttttcctgggtattgtaacatttttccagtgaagtgacatgtatcttttatatcaatagagacataattttatagcattcctcagtgtaaattgtcattccccttatttttgttttcctattgtaaataatgtctaggtaccataagttaaaacttattttcttatagaagcatcactctgagaataagggcctagacaaagtgatggagactcaagcccaagtggatgaactgaaaggaatcatggtcagaaacataggtatgtttcatggcatagtttcatgcatgtgggcaaaaatgataaagattacttgactggggtcaaattattctagagaagccaaaatagcacttccttattcttaccattggaagttaattgtcagctgagacaactgtgatactgtctgcttgtgcaaatggtttcttctttgtccttgcaactattcttcattctaaatttactagtttgcttaacaagactaatttctaagaaccttatgataattcagcagtttagaataatttggtcagtgtgattgtacagtatttcactgagttaatgtatcacgggttacctaaccttgcctgaattttggacgcataggttctttagcacagtgttagagtgctgttttgcaaccagataaggagcttgctgaagaatgtcaatcaatattgtgcttccttcactgaggccctcttgctatgaaaatgtcaattggactgaacagtatgcttagagacttagtcaaccagttgcaaatactcttaagtaggactgatttagaagtttatcctacagtagtaaccatactgttatatttttgtgcctattatgtttttcttattttcttgagattaattatcaggaatgggattaataatcaaaatgcgcaaacgttttcgtggttcttgatatgtacgtcttggctatttaaagtgatttcctttaattgattttagttttaattatatatctagatagagactagagaatctgttgagacaactactatttatttttattcttttttttgtcaccaaatgtatttattttgcccgaaagtggaggcagacaattgctacaatattatttattgcagatgcataaagtttccagaaaaatcaacgtttttaatcgactccttttaaatgacttatttatttttagagttatagaaacagcaaatttaatccatcttgaattaatttttgtataaggtataaggaagggatccagtttcagctttctacatatggctagccagttttcccagcaccatttattaaatagggaatcctttccccattgcttgtttttcttaggtttgtcaaagatcagatggttgtagatatgtggcgttatttctgagggctctgttctgttccattgatctatatctctgttttggtaccagtaccatgctgttttggttactatagccttgtagtatagtttgaagtcaggtagcatgatgcctccagctttgttcttttggcataggatggacttggtgatgcgggctcttttttggttccatatgaactttaaagtagtttcttccaattctgtgaagaaagtcattggtagcttgatggggatggcattgaatctataaattaccttgggcagtatggccattttcatgatattgattcttcctacccatgaacatggaatgttcttccatttctttgtatcctcttttatttcactgagcagtggtttgtagttctccttgaagtggtccttcacatcccttgtaagttggattcctaggtattttattctctttgaagcaactgtgaatgggagttcactcatgatttgactctctgtccgttattggtgtataagaatgcttgtgatttttgtacattgattttgtatcctgagactttgctgaagttgcttatcagcttaaggggattttgggctgagacaatggggttttctagatatacaatcatgtcatctgcaaatagggacaatttgacttcctcttttcctaattgaataccctttatttccttctcctgcctgattgccctggccagaacttccaacactatgttgaataggagtggtgagagagggcatccctgtcttgtgccagttttcaaagggaatgcttccagtttttgcccattcagtatgatattggctgtgggtttgtcatagatagctcttattattttgagatacatcccatcaatacctaatttattgagagtttttagcatgaagggttgttgaattttgtcaaaggccttttctgcatctattgagataatcatgtggtttttgtctttggttccgtttatatgctggattacatttattgatttgcgtatactgaaccagccttgcatcccagggatgaagcccacttgatcatggtggataagctttttgatgtgctgctggattcggtttgccagtattttattgaggatttttgcatcaatgttcatcaaggatattggtctaaaattctcttttttggttgtgtctctgcccggctttggtatcaggatgatgctggcttcataaaatgagttagggaggactccctctttttctattgattggaatagtttcagaaggaatggtaccagttcctccttgtacctctggtagaattctgctgtgaatccatctggtcctggactcttttcggttggtaagctattgattattgccacaatttcagagcctgttattggtctattcagagattcaacttcttcctggtttagtcttgggagggtgtatgtgtcgaggaatttatccatttcttctagattttctagtttatttgcgtagaggtgtttgtagtattctctgattgtagtttgtatttctgtgggatcggtggtgatatcccctttatcatttagacctaaaaccataaaaaccgtagaagaaaacctaggcattaccattcaggacataggcatgggcaaggacttcatgtctaaaacaccaaaagcaatggcaacaaaagccaaaattgacaaatgcgatctaattaaactaaagagcttctgcacagcaaaagaaactactatcagagtgaacagacaacctacaaaataggagaaaattttcacaacctactcatctgacaaagagctaatatccagaatctacaatgaactcaaacaaatttacaagaaaaaaacaaacaaccccatcaaaaagtgggcgaaggacatgaacagacacttctcaaaagaagacatttatgcagccaaaaaacacatgaaaaaatgctcaccatcactggccatcagagaaatgcaaatcaaaaccacaatgtgataccatctcacaccagttagaatggcagtcattaaaaagtcaggaaacaacagttactggagaggatgtggagaaataggaacacttttacacagttggtcggactgtaaactagttcaacccttgtggaagtcagtgtggcgattcctcagggatctagaactagaaataccatttgacccagccatcccattactgggtatatacccaaggactataaatcatgccgctataaagacacatgcacacgtatgtttatagcggcagtattcacaatagcaaagacttggaaccaacccaaatgtccaacaatgatagactggattaagaaaatgtggcacatatacaccatggaatactatgcagccataaaaaatgatgagttcatgtcctttgtagggacatggatgaaattggaaatcctcattctcagtaaactatcgcaagaacaaaaaaccaaacaccgcatgttctcactcataggtgagaattgaacaatgagaacacatggacacaggaaggggaacatcacactctggggactgttgtggggtggggggagggggaaggatagctttaggagatatacctaatgctaaatgacgagttaatgggtgcagcacaccagcatggcacatgtatacatatgtaacaaacctgcacattgtgcacatgtaccctaaaacttaaagtataataataataaaataaaataaaaaaagcaaatttaaaatgtgacaagaacattcctagttaattccctttcatttttttaacagcttaattgaaatataattcacatatcatataattcacccatttaaagtatacagtcagtggttactatattcacagaattgtacaaccattgctgcgatcaattttgtaacatttttatcatccctaaatgaagccctgtactcatttgcagttgctcctcaactctcagacctaagcaacaattaattcccttttcttcttcataaatttgcctattctggacatttcgtataaatggaatcttgtaatatgtggccttttgtgtcttcgttcacttagcgtaatgattgtgagattcattcatgtcgtagcataaatcaatacttaattcttttttatgactaataattccaatgcattaatgcattttatgtatctactcattagttcatggtctggttattataaataatgctgctatgaacatttgtgtacaagtttttgtgtgagcatatatatatattatatattatatatatatatatatgtttttggttctcttgcttacatacctaggaatagaattgctggatcacatggcaactttgtaacattttgaagaagggccaaactttcctaaagtgactgcacctttatacattcctaatagcaatgtatgaggattctgattcctccacatccttgccaaaacttatcttttttgattatacccagtctagtgaaatggtactttattgtgattttgatttgcatttccctgatgactaatgatgttgagcattttttcatgtgcttataggccattcgtatattttctttacctttggagaaatgtctatttaaaaatactttattgtttttaagtgggttatttgtctttttatggttgagctataacagtactttatatattctggatactagacccttatcagatacatgattttcaaatattttgctctattctgtgagttgtcttttcattttcttgatggtgttctttgaagcacaacagtttttatgaagtccaatttatttttttctttagtttgtgctttgaataacatatctaagaaactgtcgcctaagccaagatcatgaagatttactactttgttttcttctaagactagttttagctcttacatttctatctatgatctattttgagttaatgtttatgtatggaataaagaagagatccaacttaattctgttgaatatgtatatacagttgttccagaaccatttgctgaaaaggcttttctttccctgttgaatgatcttagcattcttatcaaaaattagttatcaatggatgtatagctttgtttctggaccttcagttctgttcagtttatctttatgccagtaccaggctgtcatgattattatagctttgtagtaggttttaaaatcaggaaatattcatcttccaactttattctttctcaaaattgctttgactattctgggtacctttcattttcatgaactttaggatgagcttgtcaatttcagatagcaaaaaaagctatctgggattttgatagggattgtgttgaatctgtagatcaattagggagccattttaacaatattaaacttctgatccatgaacatgggctttctttctattcatttaggtttctttaattttttccaacaatgttttgtagttttcagtgtgcaagtcttacatgacaaagactctgcttcaccaaattttagacaagctcctctgagcactctgttaaactaggtctcatcctcgggctctgtccttggcctgcctaaggaagtcttagcaaagaatcctgctaataccccacccttgatcaagttccttgtcccctatatttgttatataagtccggccagcttttagcaggaatcctgttaggccagtttagagagaatccccttgcccttgatgcctcctcttagtaattttccatcctctgaccccctcactctgttcattggccacaaatccccactggtcttggttgtgttaggagttgagctcaatctctcccctccattgtgatagccttgacccctattgcagtaatctcaaaatctgccttaccattttttaaccagtgtcagaataatttttctttaacaatatctcttctaacatccttcttgccttgttcctaagtatttttttatgctattgtaaatggaatttttctctttcattttcggattgttcagtactaatgtatagaaattttattgatttttataaattggtgttgtatcatacaaccttgttctcctttattagttctaatagctttttaatagtttccttaggattttctctatatagaatcatgctacttgcaaatagagatagttttaattcttccttttcagtctggatgcttttcatttctttttattgcttatttgccctagctagaacctccagtataatgttgaatagaagtggtaagagtggacatcattgtcttattcctgctcttagggagatcttgaagaatcttccacaattaagtatgaggttagctgtgggtttttcatagatgtcctttatcaggttgaggaagtttctttttcttatttgttgagtggttttatcattaaacagtgttggattttgtcaattttttttacatctattgaaatgatggtttttgttctttattaatatgatgtattataacaattgattttcagatattaaatcaaccttgtgtttctgaaatgaatcccactgcatcatggtgtatagtcctttttgcatattattggattcatcctgccagtagtctgttgaggatttgttaaatgtctgtatttttaagagttgttggtatatcattttcttttatttatttatttattttattatttttttttattgatcattcttgggtgtttctcacagacggggatttggcagggtcatgggacaatagtggagggaagatcagcagataaacaagtgaacaaaggtctctggttttcctaggcagaggaccctgcggccttccacagtgtttgtgtccctgggtacttgagattagggagtggtgatgactcttaacgagcatgctgccttcaagcatctgtttaacaaagcacatcttgcaccgcccttaatccatttaaccctgagtggacacagcacatgtttcagagagcacagggttgggggtaaggtcatagatcaacaggatcccaaggcagaagaatttttcttagtacagaacaaaatgaaaagtctcccatgtctacttctttcttcacagacacagcaaccatccgatttctcaatcttttccccacctttcccccttttctattccacaaaaccgccattgtcatcatggcccgttctcaatgagctattgggtacacctcccagacggggcggctgctgggcggaggggctcctcacttcgcagacggggcggctgccgggtggagggtctcctcacttctcagacagggcggccgggcagcgacgctcctcacctcccagaaggggcggcggggcagaggcgctccccacatctcagacgatgggcggccgggcagagacgctcctcacttcctagatgggatggcggctgggcagagacgctcctcacttcctagatgggatggcggccgggcagagacgctcctcactttccagactgggcagccaggcagaggggctcctcacatcccagacgatgggtgcccaggcagagacgctcctcacttcccagacggggtggcggctgggcagaggctgcaatctcggcactttgggaggccaaggcaggcggctgggaggtggaggttgcagcgagccgagatcgcgccactgcactccagcctgggcaccattgagcactgagtgaacgagactccgtctgcaatcccggcacctcgggaggccgaggctggcggatcactcgcggttagcagctggagaccagcccggccaacacagcgaaaccccgtctccaccaaaaaaatacgaaaaccagtcaggcgtggcagcactcggcaggctgaggcaggagaatcaggcagggaggttgcagtgagccgagatagcagtagtacagtccagcttcggctgggcatcagagggagaccgtggaaagagagggagagggagaccgtggggagagtgagagggggagggggagagggagagggagagccattttcttttcttgtgatgtctttggttttgataccagggtaatgctgggctcatagaatgagtcaagaagtgttccccttttcttctattttggaaagatttgtgaaagttttgtattaattcttgaaatgtttggtagaattcacctttgaagccacctgggcttgggcttttctttgtgtgaagcttttttgtttttgtttttgttttttgagatggggtctgtctgtcacccaggctggagtgcagtgacatgatcctctctaattcctctttcattcccttggtgggagggttacctgcagccttgacctcctgggctcaggtaatcttcccacctcagcctcccaagcagctgggactgcaggcatgtgccaccacacctggctaatttttgttttttggtttttttgtagagacaaggtcttgccatgttgcccaggctagtctcaaactcctgggctcaagcgatccacttgcctcagcctaccaaagtgctaggattacaggcatgagcctccatgcccggcctgaagttttaaaattactgatttagtctctatgcttgctgtagctattcagattttttatttcttcttgagtctgtttagcagtttgtatctttctaggaatttgtgcatttcatctaagttacctaatttatttacacactcctgtttatagaattcccctaagatcctcttcattttgtaagtttggtggtgatgtctcctctttcatttctgattttagtaatgtaagttttttctgttttacttggtcattctacgtaaaggtttgtcaattttattgatctttctaaagaaccaacttctggtttcatagattttttttctatagtttttctgttctctatttaatttgttcaccctaatatttatttccttcccactgctagctttagatttagtttacccttcttttctagatccataaggtagaaagttaagttgttaggttgttaatttgagatcatttgtcttagctcaggctgccataacaaaattccatagacgtagtgacttaaacaacagaaatttattttctcacatttctggaggctagaagtccaagatcacggtgccagtatggtcaggttctggtaagggctctcttcctggcttgcagacagcatcttctctctctgttctcccatcaggcaaggaaaagagagctagctgtctagtgtcttttatttaattgatacataatatttgtacacatttatggggtacgtgtgatattttgttacatgcaaagactgtgtaatgatcaagtcaggatatatggggtgtccatcagctcaagaatttatttctgtgtgatgggaacatttcaaattctctcttctagctattttgaaatatataatacactattgttaactttagtcaccctactctgctatcaaacattagaacttattccttctatccaactgtgtgtttgtacctattaaccatcctctcatattccctgctcggccccacatacccacacccttcctagcctctggtatctattgtgctattgtctacctccatgagatcaactgttttagttcccacatgtgagtaagaacatgtgatatttgtctttccatgcctgccttatatcacttaacataataacctccagttacatccatgttgctgtaaatggcatgacttcattctatttcatggtcaaatagtattccattgtgtttataaaccacattttctttatccattcatccattcatggacacttaggttgactccatatctttgctattgtgaatagggatgcaataaatatgcaagtgcagatatcccgtctatacactgatttcttttcctttgcataaatacccagtagtaggattgctggatcatatggtagtttaatttttagtttttggggaaatctccacactggtttccatagtagctgcactagtttactttcccaccaacagtgtgtaagtgttttttttttttttccttatactagccagcatctgttattttgtatctttttagtaaccattctaactggggtaacatgatatctcattttggcttttatttgcatttctatgatgttgagcattttttcatataccttttggccatttgtatgtcttcttttgagaaatggctattcatgtcctctgcccactttttaaggggattatttgtatatctcctgttgagttcattatatattctggatattattcccttatcaaatgaatagtttgcaactattttctcccattcaactggttgtctcttcactcttgattatttcctttgctgtgcaaaagcttttttgtttaatatagtcctatttgtctatttttcttttcgttacctgtccttttgaggtgttagccataaaatcttttcctagagcagtgttctgaagtgtttcccctatgttttcttctagtaggtttatagttctgggtctgaaatttaagtctttaatctatcttggttgatttttgtatgtgatgagagacagaggtccagtttaattcttccacatatggatatccagttttcccaataccatttattgaagaaagtgtcctttccccagtgtacgtccttggcacctttgttgaaaatcagttgcctatatatgtgtggctgtacatacgtggatcaatgtctggcttttctattctattccatcgaccttgtgtctgtttttataccaaaccatgctgttttggttactgtagccttgtaatatgttttgaagtcaggtagtgtgatgcctccagctttgttcattttgctcaggattgctttggctatttggactcttttttggttcctgaaatactaattttaggattgttttttctgtttctgtgaaaaatgacattggtacttcgatagagattgcattgaatctgtagattgctttgggcttatggtcattttaataatatacattcttatgatccatgaccataagatgtctttctgtatctttgtgtcatcttcagtttttttcatcagtgttttgtagttttacttgtaggagtctttcacctactcgttaaatttattcttcaatattttatatgttcataactattataaatgggattaccttcttgatttcataaagttttatttcaccaagttgattattgatgcatagaaacattacagatatttgtatgttgattctgtatcctgcaactttactgaatatatttatcagatctaggagttttttggtggagtctttgggtcttttagacataagatcatatcatctgcaaagagggataatttgacatcctctttttcaatttggatgccctttatttctttctcttgcctgattgctctggctaggacttccagtattgtgttgaataggagtagtgaaactgggcttccttccagtactatgttgaataggagtggtgagagttttccatttcttagaggaaaggcttttcgtttttcccattccgtatgatgttagctgtgggtttgtcataaatggcctttatcatgttgagggatattccttctatgcctagttttttgagagtttttatcatgaagagatgttgaattttttttgataccttgaactatatatttttatttgaatatataaaagtagaatatcctattttccttttgagctatgtcatcatactgctaaaattatggatgaaaatggaaatatttcaacctgacccattgcaatttctatgttacacatttgctctttttttattattatactttaaattctgggatacatgtgcagaatgtgcagctttgttacataggtatacacatgccatggtggtttgctgcacccattaacccatcatctacattaggtatttctcctaatgctatttctcccctagcccccctacccccaacaggccccagtgtgtgatgttcccctccctgtgtccatgtgttctcattgttcaactcccacttatgagtgagaacacgtggtgtttggttttctgttcctttcttaccttgctgagaatgatggtttccagcttcatccatgtccctgcaaaggacatgaactcctccttttttatggctgcatagtattccatcgtgtatatgtgccacattttctttatccagtctatcattgttgggcatttgggttggttccaagtctttgctattgtgaacagtgctgcaataaacatacgtgtgcatgtgtctttatagtaaaatgatttataatcctttgggtatatacccaataatgggattgctgggtcaaatggtatttctggttctagatccttgaggaatcgccacactgtctttgacaatggttgaactaatttacacttccaccaacagtgtaaaagcattcctattgctccacatcctctccagcatctgttctttcctgacttgttaatgattgccatttaatggtcgccattcttactggtgtgagaggatatctcattatggttttgatttgcatttctctaatgacccgtgatgatgagcttttttttcatatgtttattggccacataaatgtcttcttttgagaagtgtcttttcatatccttcacacactttttgatggggttgtttttttcttgtaaatttgtttaagttccttgtagattccggatattagccctttgtcagatggatagattgcaaaaattttttcccattctgtaggttgcctgttcactctgatgatagtttcttttgctgtgcagaagctctttgctttaattagatcccatttgtcaattttggcttttgttgccattgcttttggtgttttagtcatgaaatctttgcccatacctatgtcctgaatggtattgcccaggttttcttctagggattttatggttttaagtcttatgtttaagtctttaatccatcttgagttaatttttgtataaggtgtaaggaagggggccagtttcagttttctgaatatggctagccagttttcccaacaccatttattaaatagggaatcctttccccattgcttgtttttgtcaggtttgtcaaagatcagatggttgtagatgtgtagcgttatttctgaggcctctgttctgttccattggtctatgtatctgttttggtaccaataccatgctgttttggttactgtagccttgtagtataatttgaagtcaggtagcgtgatgtctccagctttgttcttcttgcttaggattgtcttggctatgtgggctcttttttggttccaaatgaaatttaaagtagtgtttttctaattctgtgaagaaagtcaatggtagctggatggggatagcattgaatctataaattactttgggcagtttggccatattcttcctatccatgagcatggaatgtttttccattcatttgtgtcctctcttatttccttgagcagtggtttgtcattctccttgaagaggtccttcacatcccctgtaagttgtatttctaggtattttattctctttgtagcaattgtgaatgggagttcactcatgatttggctctctgtttgtcttttattggtgtataggaatgcttgtgatttttgcacattgattttgcattctgatactttgctgaagttgcttatcagcttaaggagattttgggctgagacaatggggttttctaaatatacaatcatgtcatctgcaaagagagacaatttgacttcctctcttcctatttgaataccctttatttctttctcttgcctgattgccctggacagaacttccaatactatgttgaataggagtggtgagggagggcatccttgtcttgtgctggttttcaaagggaatacttccagcttttgcccattcagtatgatattggatgtgggtttgtcataaatagttcttattattttgagatgcattccatcaatacctagtttattgagagtttttagcataaagcggtgttgaattttatcgaaggccttttctgcatctattgagataatcatgtggtttttgtcattggttctttttctgtgatggattacgtttattgatttgcgtatgttgaaccagtcttgcatcccagtgatgaagctgacctgatcgtggtggataagctttttgatgtgctgatgggttcgatttgccagtattttattgaggattttcgcatcagtgttcatcagggatattggcctgaaattttcctttttggttgtgtctctgccaggctttggtatcaggatgatgctggcctcataaaatgagttagggaggagtccctcttcttctgttgtttggaatagtttcagaaggaatggtaccagctcctctttatacctctggtggaattcagctgtgaatccttctggtcctggaccttttttgtttggtaggctattaattactgcctcaagttcagaacttgttattgttgtattcagggatttgacttcttcctggttcagtcttgggagggtgtatgtgtccaggaatttatccatttcttccagattttctagtttacttgcatagaggtgtttatagtattctctgatggtagtttgtatttctgtgggatcagtggtgataccccctttatcattttttattgtttctatttgattcttctctcttttctcctttattagtctcgctagcagtctatcaattttgttaatcttttcaaaaaaccagctcctggattcattgattctttttgaagggtttttcatgtctctttctccttcagttctgctctgatcttagttatttcttgtcttctgctacctttgaatttgtttgctcttgcttctctagttcttttaattgtgatgttagggtgttgactttaaatctttcccactttttgctgtgggcatttagtgctataaatttccctctaaatactgctttagctgtgtcccagagattctggtacgttgtgtctttattctcattggtttcaaaaaacttatttatttctgccttaattttgttatttacccagtagtcattcaggaacaggttgttcattttccatgtagttgtgcagttttgagtgagtttcttaatcctgagttctaatttgatggcactgtggtctgagagactgttggttacgatttccattttttgcatttgctgaggagtgttttacttccaattatgtgatcaactttagaataagtgcaatgtggtgctgagaagaatgtatattctgttgatttggcttggagagtactgtagatgtctattaggtcctcttggtccagagctgagttcaagtcctgaatatccttgttaatattctgtctcaatctaatattgacagtgggtgttaaagtctcctactattattgtgtgggagtctgagtctctttgtaggtctgtaagaacttgctttatgaatctgggtgctcctgtattgggtgcatatatatttaggatagttagctcttcttgttgcattgatccctttaccattatgtaatgcccttttttgtcttttttgatctttgttggtttaaagtctgttttatcagagactaggattgcagccactgcttttttttgctttccatttgcttagtaaataatcctctatccctttattttgagcctgtgtgtgtctttgcacatgagatgggtctcctgaatgcagcacatgggtgggtcttgattctttattcaatttgccagtctgtgtcttttatttggggcatttaccccatttacatttaaggttaatattgttatgtgtgaatttgatcctgtgattataatgctagttggttattttgcttgttagtcgatatagtttcttcatagtgttgatggtctttacagtttgatatgtttttgcagtggctggtactggtttttcctttccatatttagtgcttccttcaggacctcttgtaaggcaggcctggtggtgacaaaatctctcagcatttgcatgtctgtaaaggattttatttctccttcacttataaagcttagtttggttggatatgaaattctgggttgaaaattcttttctttaagaatgttgaatattcgcccccagtctcttctggcttgtagggtttctgtcgagagatctgctgttagtctgatgggcttccctttgtgggtagcctgacctttctctctggctgcccttaacattttttcctgcatttcatccttggtgaatctgacgattatgtgtcttggagttgctcttctcgaggagtatctttgtggtgttctctgtatttcccaaatttgaatgttgacctatcttgctaggttggggaagttctcctggttaatatcctaaagaatgttttccaacttggttctgttctccctgtcactttcaagcacaccaatcaaacataggtttggtcttttcatatagtcccatatgtcttggagcctttgttcattccttttcattattttttctctaatcttgtcttcacactttatttcattaagttgatctacaatctctgatatcctttcttccacctgatcagttcggctattgatacttttgtatgcttcacaaagttctcgtgccgtgtttttcagtcccatcaggtcatttatgttcttctctaaactggctattctagttagcaattcctctaaccttttttcaaggtccttagtttccttgcatggggttagaacattctcctttagcttggaggagtttgttattatccaccttctgaagcctgcttctgtcaatttgtcaaactcattctccgtccagtttgttctcttggaattttcagcctttttgcactggtttttcctcatcttcatggatttatctacctttggtctttgatgttggtgacctttggatggggtttctatgtggacatcctttttgttgatgttgatgctattcctttctgtttgttagttttccttctaacaggcctctctgctgcaggtctgctggagtttgttggaggtccactccagacccagtttgcctgggtatcaccagcggaggctgcagaacagcaaagattgctgcctgttccttcctctggaagcttcgtcccagaggggcacctgccagatgccagccagagctctcctgtatgagatgtctgtcgactcctgctgggaggtatcttccagtcaggaggcatggagctcagggacccacttgaggaggcagtctatactttagcagagcttgagcactgtgctgggattgccgctgctctcttccgaactggcaggcaggaacgtttaagtctgctgaaactgagtccacagccaccccttcccccaggtgctcggtcccaaggagatgggagttttatctataagcctctggctggggctgctgcctttctttcagagatgcgctgcccagagaggaggaatctagagaggcagtctggctacagggactttgcggagctgcggtgggctctccccggttcaaacttcctggccactctgtttacacagtgaggggaaaactgcctactcaagcctcagtaatggcagacgcccctccctccaccaagctcgagtgtcccaggtcgacttcagactgttgtgctggcaatgagaatttcaagccagtggatcttagcctgctgggctccgtgggggtggaatatactgagctagaccacttgcctccctggcttcagcccctttccaggcgagtgaacagttatgtctcactggcattccaggcgccactggggtatgaaaaaaaaactcctgcagctagctcggtgtctgcccaaatggccgcccagttttgtgcttgaaacccaggtccctggtggcataggcacccaagggaatctcctggtctgcagattgcgaagactgtgggaaaagcatagtatctgggccagagtgcaccattcctcacggcacggtccctcaaggcttcccttggttaggggagggagttccccgaccccttgtgcttcctggatgaggcaacgccccaccctgcttcggctcaccctccgtgggctgcacccactgtctaaccagtcccaatgagatgagccgggtacctcagttggaaatgcagaaattacccaccttctgcattgatttcactgggagctgcagaccagagctgttcctattcggtcatcttgccaaccaccctgagatgttgaattttatcaaatgctttttttatcagatgctttctctgcatctattaaggtgatcatgtggcttttattctctattctattgatggaatgtttcatgtttattgatttgcatgcattgaatcatcattgcatccctgggataaatcccacttgatcatggtgtattatctttttgatgtgatgtttgatttggtttgctagtatttcgttgaggatttttgcatctgtgatcatcagggttgttggcctgcagttttgtttttttgttgagtccttatcaggttttggtatcagggtaatgctggccttatagaatgagtagggagaattccctcctcttgaattttttggcatagtttgagaagtgatattagttcttctctgtaagtttcatggagttctccagtgaagccagctgattctgggcattgttttggttttgttgggagactttattactgattatactttattactgattcaatcccattactcattactggcttgttcaggttttctatttctttctgattcagtcttggtaggttgcatgtgtcctgggatttatccatttcttctgggttttcaagtttattagcatatagttgttaatagtatttctatggtcacttcttccaatttttagatttgctttaatatgcaaggactttttcttgaggatatatctatggtgttggttgggcagggcacttagactttgattatgggtacattcagtagtgtagtctgtataatttcttcagctataaacagcatcatcaaccatgtctgtatttttcttagtggcttagggtgtagttgttatggaggctgtggtgaagttttgatgggcatggggatttcaggtgggctagtccttgttttcgagtggtgtcaccagtgggtgaagcatgcctgtcctttggccccaggacagtgtattcattaagttatattacttttttaaaaaaagtttattttattctacaatggaaaacttgaccttttctacttttccaatattttcagatctggtagctcagcgaggagaaagattggaattattgattgacaaaacagaaaatcttgtggattctgtaagtatggaatctgataatatggagtctgatgtaaagtggagaaactatggatgatggctaacataattgggaaataccttaaattcaaatatttggtggtttttttttctttctcatttccattatgtgattactttgtaataatgaggataacaatgaggcatagaaaagaaacatcatcccctaatagccattaaggtagctttggtttggaaaacatactcagtatacagaaacaattttctaaagctttggattgaggcctatataatttagcacctcaactgcatgtaacagtctgttccctttacaaatttgtaaaacatgaaacaaatgtgcaagccgtttgtgacccagtatgaatcttgaaaactggacaattcacttttttgcttacactgatagtttcatcttgccttgtatcaatcaagagacatcgattggaaagcgccaataagccttaaaggagacaatgtgtccttgtgagctgcttatactatggttccgtatgtcctcacattttcaatgcagttactgtggatgaaagttttaaggaaagatgacagatatatggtgaacagaaggagggcagagatcagctacaatttgggtctacacaattataaatgtaaatgtacagtgcaggtttacaccttgaaagaaaacagtgattgattatgttcgttgtgactgacagctggattgtagtggttaagaacacaggctctagtatcaggttgcctggatttgaatcccacctctgctacttactagttgtgtgaccttaggcaaatgacttaacctctttgtgcctcagtcatcatcttctgtaaaatgaagatgtacccacttcagagcattttaaggattaaatcagataatgcatgtaaagtgcctaacacagtatttgatacatagtaagagctatttaaatgttcatcattattgttaattttacagggacatctattagcagcaggttttagtatatacagtctactatcaggttttctaggagtttataaacagttttttcatcaaagcatgtggtaggtggaggaaggatgctaccatacaggaagtcaaaacacctgggttctagatctcactttgtgacccattgctggggagcaaagaaaacagagaagtatctgattccagatctgcagaccaatttctttgatacttccaggctgtctcttagttattcttaattcttgaggattaccctgcttagggggaatggtctgtctttgaccaatagtagtatgatctgtactttacaaataaaagtcttaattttgttgacttcatgactgaaaacagaaggtactaatgaactaacaggtatctctctttatggtagaataacatacgtgcagcaaattgtatcaagtgtacaacttttaagtgtatagctcaattattttttatatatatctatacccatgtaaccaccacccagatctagatagaaaacattaccaacaccccagaaggctgcctcataccccttccagttaataatccccaatagacgtaattatgtttctgacttatatcaccacagatagtgttttgcctgttcttaaaatttatttgtgtctggcctctttcactcactgttatgcctgtgaaattcatccacgttttttattatagtaatcacttattcttttttattgttttatattattccattatacaaatctaccacaatttgtttatccgttcttctctgtggggctttatttctggattctctattttgttccattggtcagtttgtctacctttatgccagtaccacactgtgttgattagtataacttaatagaattcttgaaattaagtagtgtaagtcttccaactatattcttgttgtccaatattgtcttcactcttttaggtgctttgcatttccatatatgttttagaataagcttgttttccatctcttgaccccacaacaatgtgtatctttgtgactgcatttaatatataggtcactttaggggacattggtatcttgacagtatagagtttttcggtccatgaacgtgacatatctctgcttttgcttaggatttaaaaatttttctcagcagtattttttagtttttggtgtacaggtcttgcacatatttgttaaatttacccttgagaatatcatgcttttgtattgtgtaacaaatttttaaattttgtttctaattctttattgctagtatatggaaataaagttggttattgtatattgaccttgtttgtattctgcaaccttagaaaaattcatttaccagttctggttactgttttgtacattcctgccttttattttccttcccttattctggctagaaccttctacacaatactgaatacaagtgataacagtgaacatccttgcctattgaccatcttgtggggaaaaattcaatactttttgaaaaaaataaattcagtgttaagtttgtggttaactgtagattttttgtaggtaccctttaataggtggaagaattccctttaattcctcatttgagagttgtattcatgattttatcaaatgctttttctccatttattgagatctttggtttttctcctttattcagttagtatggcaaattacattgatttttcagtgttaaaccaactttgcattcctgcaaggtcatgacttactacccttcttatataacactttattggatttgctattgttttgttcaggaatttggcatctatgtttataagagatagtggtctgtaatttatttttctctttaggttttggtatcaggaatatgctggcctcattaaacaagttgggaaatcttacctctctatcttctgagtttgggtactattggtattatctgtcttagatgtttggaagaatttactagtaaagcagattgggcctcgagttttcttcgttggaaaatttaaaatctgccatcttgctgtttgtttcctatttataccatctagtctttgttccctttttgttctgccttccattggatttagtacatttgttattccattatgtctcctttgtcagtttattagctatagctccattctgtcattttctgattgctttagggtttacagtatgtctttgatttataatctcccttaaagtggcatttttccacttcatgaatagataagaaccttataatagtatacttctagctgtttcttcttggcctttatgctattgttgacatatttttatttacacatgtattaaaaacttcataatacattgttgttgtttttgtttaaagagttgattatcttttaaagagatttaaataataagggaagtcttttctgtttacccatgcagctaccatttcagtgctcttaattcttttgtgtaggccgagtttctatctgatgttattttctttctgcctgtatgctttaatttaacatataatcttccattgtagttcaagtgtgtaggtctactggaaatgaattctttcaggtttggtatgtctgagaagtttttatttcacttcctttttttttttgaaagacattttcactgagtatagaattctaggtcagtgatttttctttcttttaatacttgatgaacggtggttcatcactgtcttttacattgtttctgacaagaattctgctgtcattcttacatacataaagtgtatttttttttcttctggatgctttaaagattttctctttatcattggttttaagaaatttgattataatatatatgccttggtatatatttctttatgtttctttggctttgagtttgttgtagttttcatcaaattatgaaaatgtttagctctttctaggcttccagtgacatctgtattaagccacttgaagctgtcccacaactcactgatgctttgttcatttttaagtcttttttccactatgtttcatttagaatagtttctattgctatgtcttcaagtttacttaccttttcttctgcagttcgcaatctgctgtttctgtcctgtgtatgtttcatctttacaggtttgttttggatcttttttatatcttccatgtgtctccttaacatgtgcatactttcctctaccttgagtatatgaagtatatttataattgaagtgcttattccacttacatgtaatgcaaattttgatagagttaggtgtaggtatcttgctctttgttttttatttgccgcatccctgtcctcttcttttttattttgattactcaagtactttttaaattgttttttaaccatctctatttgttttttaacacttctattgagagataactcacagaccatacaaattgcccatttaaagggtacacttcagtggaatttagtatattacattattaaaattgtggtaaaatatgtatagcataaaattttgccattttaacctttttaaagtgcacaattcagtgatgttaattacatccacaatgttgtgcatccatcactactagctatttccaaaacttttttatcaccccttaacaaaaactctgtaaccattaagtaataataactccccattccccttactctcagcccctggtaactctaatctactttctgtctctgaatttgcctgttctagatatgtcatataagtgggatcatacaaaatttgcccttttgtgtctggcttatttcactaagcataatagtttattgcttaaaaaaaaatgctaacaatcacctgagccttcagtgagccttaatctttttgctggtggagggtctcaccttgatgttgatggctactgactgatcgatcaggctggtggttgctgaaggttgtggtggctgtggcaatttcttaaaataagacaacagtgaagtttaccacattgattgactctttcacaaaagatttctctgtagcatgtgttgctatttgatagcaatttactggcaatagaacttctttcaaaattggagtcaatcctctcaaaccctgctactgctttatcagctgagttgatgtaattttctaaatcttttgttgtcatttcaacagtgttcacagcatcttcaccaggaatagttgccatctcaagaaaccactttccttgcccatgcataagaaacaactcctcattcattaaagttttatcaagaaactgcagcagttcagtcatgtcttcaggctccagttctaattctagttctcttctatttctaccacatctgcagttactcactccactgaagtcttgaacccctcaaagtaatttgtgagggttgtaatcagtttcttccaaacacctgttaatgtttatattttgacttcctcccacgaatcatgaatgttcttaatggcatctagaatggtgaatcctttctagaaggtcttcagtttactttgcccagatccatcagaggaatcattatctatggcagctatactaaatgtttttcttaaataataagacttgaaagttgaaatcactccttgattcatgggcagcagaatggatgttgtattagcaggtgtgaaccccaaaagtctgagacaggtctcagttgatttagaaagtttattttgccaaagttgagagcgcacacccgtgacacagcctcaggaggtcctgacaacatgtgcccaaggtggtcaaagcccagtttggttttatacattctagggagacgtgagacatcagtcaacatatgcaagatgaacattggtttggcctggaaaggcggaacaactcgaagcaaaggcgggaaggctcgaagtggggagggggcctccaggtcttagatagataagagacaaatggttctattcttttgagtttctgatgagcctctccaaaggaggcaatcagatacgcatttatctcagtgagcagaggggtgactttgaatagaatgggaggcaggttggccataagcagttcccagcttgacttttccctttagcttagtgatttggaggccccaagatttattttcctttcacacaggcatgaaaacgacatttatctcctcgtaagtctccatcagagctcttgagtgactaggttcattgtcaatgagcagtaatactttgaaaggaatcttttctttttgagcagcagatctccacagatcttctgtacaccatcctgtaaacagatgtgctatcttccaggtttgttgttccatttcaagagcacaggcagagtatatttagcataattcttacgggccctagattttcagaatggtaaattaccattggcttcagcttaaagtcatcagctgcattggtccctaataaaagtcagcttatcctttgaagctttgaagccagtcattggcttctctctatgaaagtcctagatggcatcttcttccaaaagaagggtgttttgtttacattgaaaaatctgttgtttagtatagccacctttatcaatgatcttagctaggtctcctggataacttactgtggcttctctctcagcacttgctgcttcaccttgtacttttatgttatagagatggcttctttccttaaacctcatgaaccaacttctgctagctttaaacttttcttctgcaccttcctcgcctctctcagccttcatagagttgaagagttagggccttgctctgtattaggctttggcctaaggaaatgttatagctggtttaatcttctatccagacccctaaaacattctccatatcagcagtaagtctgttttgctttcttatatgtgtgttcactggagtagcactcctgatttccttcaagaactgttctttgcattcacaatttggttaactgtttgtcacaggacacctagctttaggcccatctcagctttcgacatgccttactcactaagcttaattatttttatcttttgatttaaagcaagggatgtgtgacttttcctttcacttgaatacatagatgccattgtaaggttattaattggccaaatttcaatattgtgtctcggcaaatagggaggcctgagagggagagagataagagaatagctggtcagtgaacagttagaacacacaacatttatccgttagctccgtcaccttatataggcacagtttatggcacccgaaaacaatcacaatagtaacatcagaggtcacagatcgtcataacagatagaatgaaaataatgaaaagtttgaaatgttataagaattaccaaaacacagacatgaggcgaccacatgctgttagaaaaatggtgctgccgcatgttctcactcctaagtgggagttgaacaatgagaacacatggacacagtgaggggaacatcacacactggggcctgtcggggagtgggggctaggggagggatagcattaggagaaatacctaatgtagataacgggttgatgggtacagcaaaccaccatgtcacgtgtatacctgtgtaagaaacctgcacgttctgcacatgtatcctagaacttaaagtataataataataataaaaagaaacaaaaagtgcaggccaagcaggaaaaaaaaaaaacaaaccagaaaaatggtgctgatagtctcatcatggggtttccacagaccttcgatttgccaaaaaaaaaaaaaaaaaaaaaaaaaaatccatgaagtgcgataatgtgaagtacaataaaaggggatatgcctgtaattctttctgtgtcctttattgttttcctgcagttctgtttcagtgtacgattttgtttgcttcaaactgaagaagttcttttattgtttcttataatgttgatctactgatgagagattctctaagcttttgtctgaaaatctgtttcatcatttttttaaagaatactttctttgcatagagttttttagtttttcacaatggcagtttttttttttttttaaagtgagtgctttaaaaatgccattccatttttctttggctttcatatgttctcaaagagattgtcatttctcttagtcttacttgaaaaataatgattcttaccccacctttggcttttgttgttgttgttgttgttgtttgttttgtttttttaagacagagtctctctctctcacccaggctggagtgcagtggcacgatcacagcttactgttgcctccacctcccaggctcaagtgatcctcctgccttgcctcagcctcccaagtaggaggaccacaggcatgcgccatcacacttagctaattttttaaatttttcttagagacgggtctccctatgttgctctggctggtctcaaatgcccaggctcaagtgatcctcccaccttggcttcccaaagtgctggaaatacaggcatgagccaccacacctggccccctttggctggttttaagagtgtctttttatatttggttttcaactttttatatatggttattagctttctgtggctgctatcacaaattatcacaaacttggtggcttaaaacaacaaaaatttattttctcccactactggatttcagaagttcaaaatcagtttaactgggctgaaattaaggtgttagcaaggctacactccttccagaggctctaggagaggatctgttccatgcctcttccagcttcaggtggctgccagtatttcttggcttgtggctatatcattgtagtctctgcctccatgttcacattaccttctcctttgcatgtgtgtcaagcctccatctactttcctcctatagagacatttgtgatgtcatttagggctcacatggataatccaggatactctcttcatctcaagattcttgacataatcacatctgtaaagaccccttttccagataatatcacatatgtcacattcatagggattaggacacaggcatgtcttagggcaacatttaacaattgttctttataggtgaacttgttttaaacagatggtttgtcagtgttcagatgttgacctgagagtggtggaggaatctccattacaacctgttgaatcacacagctatgttcggatttattagtttcattcctcactgctttttctcatctacatcatctttctctttcttgaattatttattgtgaattagtctttgtttgtagtatatcctcacacattttcttcatatgagtttgtggatgataatcccttcaagaataaaagtgttattttggtctcatatttgaacaattttttgactggtgtagaattctagggttaagatcattttctctcaaaattctctgaatattgctgcatttcagtgcatgaagaatttaggcatctgagaagttcaacaactatacagtttacacgttttttatttgggccaagtttgaggactgcaacccaggagcatagattcaagttgctctgaatatatgttctaattagcagcagttacaagtaggtttttaaaggaaaaaaggagaggcagtatctaatttgtttaccaagaatttacattaaaatagcataagctattgattgctatacattgtcctttgtatcacaaattccaggaacatgaagataatggttgaggcagctagtcagcaacaaattgcctttaaacagttgccccccctgggcattgtgtggggggtgtgactgaagtccccatactcatgtcttctgggcctgataaattttatatacctcacatagctcaggctgctctgagctgtttttcttttctcatttcccccttttgatcaaaatttttctcttctgaaagcattgatgatcagcattttagatataagtttatcccatgtcactggggaggcttattcccagatattcttgtcccgtgttggatggaaagacgtaaaaaaggtaccatggcttaaagaacttagtgaggtctcaaggccaaattgattggcaacacagaggagcagagcaacaggatctcagtcaagccatccactcacgctggagccatggcatgaacaactatacagtttactcaagtccaccctcacttaatggcaccaactgcaagtttggggattccccaaaccaccctcagatttgatagttcattagaaggatttataatactctgtgagcactattatactcacagttatggtttattacaggcaaattatacatagtaagaccagccaagggaaaaagtacatagggtggagtttgggaagataccaaatgtagagcttttgttgtcctcttcccatggagtcaggacacgttgctctcttggcatcagtgtgtgacaaaatgtgcagagcattgcctaacaggaaagcttacccaagccttagtgttcagagtttttattggggtttcattatgtaggcattattgactgactgccctctggcttgatctcagtctccagctccacttggtgtgatccaaagcctcctaaatcacatagtcattttttctggagtgtcttttccccaccctaaatcacattgttactatctagattacagtctattagaaaaataaatcaaggctgtgcatggtagctcatacctataatcctaatacttatactttgggaggccaaagctgaaagatctctaaaatccagaagttcaagaccagcctaggcaacaaagtgagaccttatctctacaaaaccaaacaaaaaaaaaaaaaaaataggtgtgattgggtgcacctgtagtcctagctacttggggggctgaagatggagaattgcttgaacccaggaattcagagctgcagagagctatgatcacaccactgcattccaggctgggttacagaggggtgacctccatctcaaaaaaaaaaaaattttttttcttttaattcttttttattttttattttttttataaatatatatattttttattatactttaagttctagggtacatgtgcacaacgtgcaggtttgttacatatgtaaacatgtgccgtgttggtgtgctgcacccattaactcatcatttacattaggtatatctccaaatgctatcccttccccctcccaccaccccacaacaggccccggtgtgtgatgttccccttcctgtgtccaggtgttctcattgttcagttcccacctatgagtgagaacatgtggtgtttggttttttgtccttgcagtagtttgctgagaatgatggtttccagcttcatccatgtccctgcaaaggacatgaactcatccttttttacggctgcgtagtatttcatagtgtatacgtgccacattttctgaatccagtctatcattgttggacatttgggttggttccaggtctttgctattgtgaatagtgccacgataaacatacgtgtgcatgtgtcttgatagcagcatgatttataatcctttgggtatatacccagtaatgggatggctgggtcaaatggtatttctacttctagatccctgaggaatcgccacactgtctttcacagtggttgaactagtttacagtcccaccaacagtgtaaaagtgttcctgtttctccacatcctctccagcacctgttgtttcctgactttttaatgatcgccattctaactggtgtgagatggtatctcattgtggttttgatttgcatttctctgatggccagtgatgatgagcattttttcatgtgtctgttggctgcataaatgccatcttttgagaagtgtctgttcatatccttcacccacttgttgatggggttgtttgtttcttttcttataaatttgtttgagttctttgtagaatctggatattagccctttgtcagatgagtagattgcaaaacttttctcccactctgtaggttgcctgttcactctgatggtagtttcttttgctgtgcagaagctccttaattagatcccatttgtcaattttggcttttgtttccattgtttttggtgttttagatatgaagtccatgcccatgcctatgtcctcaatggtattacctaggttttcttctagggtttttatggttttaggtctaacatttaagtctttaatccatcttgaattaattttagtataaggtgtaaggaagggatccagtttcagctttctccatatggctagccagttttcccagcaccatttgttaaatagggaatcctttccccatttcttctttttgtcaggtttgtcaaagatgacatggttgtagatgtgtggtattacttctgagggctctgttctgttccattggtctatatctctgttttggtaccagtaccatgctgttttggttactgtagccttgcagtatagtttgaagtcaggtagcatgatgcctacagttttgttcttttggcttaggattgacttggcaatgcaggctcttttttggctccacatgaactttaaagtagttttttccaattcagtgaagaaagtcattggtagcttgatagggatggcattgaatctataaattaccttgggcagtatggccattttcatgatattgattcttcctatccatgagcatggaatgttcttccatttgtttgtgtcctcttttatttcgctgaacagtagtttgtagttctccttgaagaggtccttcacatcccttgtaagttggattcctaggtattttattctctttgaagcaattgtgaatgggagttcactcatgatttggctctctgtttgtctgttattggtgtataagaatgcttgtgatttttgcacgttgatttcgtatcaagactttgctggagttgcttatcagcttaaggagattttgggctgagataatggggttttctagatatacaatcatgtcatctgcaaacagggacaatttgatttcctcttttcataattgaataccctttatgtctttctcttgcctgattgccctggccagaacttccaacactatgttgaataggagtggtgagagagggcatccctatcttgtgccagttttcaaagggaatgcttccggtttttgcccattcagtatgatattggctgtgggtttgtcatagctcttattattttgaaatacgtcccatcaatacctaatttattgagagtttttagcatgaagggctgttgaattttgtcaaaggccttttctgcatctattgagatgatcgtgtgttttttgtctttggttctgtttatatgctggattacatttattgatttgtatatgttgaaccagccttgcatcccagggatgaagcccacttgatcatggtagataagctttttgatgtgctgctggattcgatttgccagtattttattgaagatttttgcgtcggtgttcattagggatattggtctaaaattctctttttgtgttgtgtctctgccaggcttaggtatcaggatgatgctggcctcataaaatgagttagggaggattccctcattttctattgataggaatagtttcagaaggaatggtgtcagctcctccttgtacctctggtagaattcggctgtgaatccatctggtcctggactttttttggttggtaagctattaattattgcctcaatttcagagcctgttattggtctattcagagattcaacttcttcctggtttagtcttgggagggtgtatgtgtcaaggaatttatccatttcttctagattttctagtttatttgtgtagaggtgtttgtagtattctctgatggtagtttgtatttctgtgggatcggtggtgatatccccttttatcattttttattgcgtctatttgattcttctctcttttcttctttattagtcttgctagcagtctatcaattttgttgatcttttcaaaaaaccagctcctggattcattgatttcttgaagggttttttgtgtctctatctcgttcagttctgctctgagttatttcttgccttctgctagcttttgaatgtgtttgctcttgttcctctagttcttttaattgtgatgttagggtgtcaattttatatctttcctgcttccttttgtgggcatttagtgctataaatttccctctacacactgctttaaatgtgtcccagagattctggtatgttgtgtctttgttctcattggtttcaaagaacatgtttatttctgcattcatttcgttatgtacccagtagtcattcaggagcaggttgttcagtctccatgtagctgagcagttttgagtgagtttcttaatcttgagttctaatttgatttcactgtggtctgagagacagtttgttataatttctgttcttttacatttgctgaggagtgctttacttccaactatgtggtcaattttggaataagtgcgatgtggtgctgagaagaatgtatattctgttgatttggggtggagagttctgtagatgtctgttaggtccgcttggtgcagagctgagttcaattcctggatatccttgttaactttctgtctcattgatctgtctaatgttgacagtggggtgttaaagtctccctttattattgtatgggagtctaagtctctttgtaggtctctaaggacttgctttatgaatctgggtcctcctgtattgggtgcataaatatttaggatagttagctcttcttgttgaattgatccctttaccattatgtaatggccttctttgtctcttttgatccttgctagtttaaagtctgttttatcagagactaggattgcaacccctgcctttttttgttttccatttgcttggtagatcttcctgcatccctttattttgagcctatgtgtgtctctgcacatgagatggatttcctgaatacagcacactgatgggtctttactctttatctaatttgccagtctgtgtcttttaattggagcatttagcccatttacatttaaggttgatactgttatgtgtgaatttgatcctgtcattatgatgctagctggttattttgctcgttagttgatgcagtttcttcctagccttgatggtctttacaatttggcatgtttttccagtggctggtatgtgttgttcctttccatgtttagtgcttccttcaggagctcttgtaaggcaggcctggtggtgacaaaatctctcagcatttgcttgtctgtaaaggattttatttttccttcacctatgaagcttagtttggctggatatgaaattctgggttgaaaattcttttctttaagaattttggatattggcccccactctcttctggcttgtagagtttctgccgagagatcagctgttagtctgatgggcttccctttgtgggtaacccgacctttctctctggctgcccttaacattttttccttcatttcaactttggtgatctgacaattatgtgtctcggagttgctcttctcgaggagtatctttgtggcgttctctgtatttcctgaatttgaatgttggcctgccttgctaggttggggaagttctcctggctaatatcctgcagagtgttttccaacttggttccattctccccatcactttcaggtacaccaatcagacgtagatttggtcttttcacatagtcccatatttcttggaggcttttttcgtttctttttattcttttttctctaaacttctcttctcgcttcatttcattcatttggtcttcaatcacggataccctttcttccagttgttcgaatcggctactgaagtttgtgcattcgtcacttagttctcgtgccatggttttcagctccatcaggtcatttaaggacttgtctacattggttattctagttagccattcatctaatctttttttcaaggtttttagcttctttgtgctgggttcaaacttcctcctttagctcagagaagtttgatcatctgaagccttcttttctcaactcgtcaaagtcattctctgtctacctttgttctgttgctggtgaggagctgcgttcctttggaggaggagaggcgctctgatttttagaattttcagtttttctgctgtttttttccctatctttgtggttttatctacctttggtctttgatgatggtgacatacagatggggtttttgtgtggatgtcctttctgtttgttagttttccttctaacagtcaggaccctcagctgcaggtctgttggagtttgtcggagggccactccagaccctgtttgcctgggtatcagcagcggaggctgcagaacagtgaatattgctgaacaccaaatgttgctctctgatcgttcctctggaggttttgtctcagaggggtacccgccgtgtgaggtgtcagtctgcctctactggggggtacctcccagttaggctgcttgggggtcagggacccacttgaggaggcagtctgtctgttctcagatctcaaactctgtcctgggagaaccactactctcttcaaagctgtcagacagggacatttaagtttgcagaggtttctgctgccttttgttcagctatgccctgcccccagaggtggagtctacagaggcaggcaggcctccttgagctgtggtgggctccacccagttcgagcttcccggcagctttgtttacctactcaagcctcagcaatggcgggcgcctctcctccagcctcgctgccaccttgcagttcaatctcagactgctgtgctagcaatgagtgaggctccgtgggtgtgggaccctctgagccaggcgcgggatataatctcctggtgtgctgtttgctaagaccgttggaaaagcgcagtattagggtgggagtgatccgattttccaggtgccatctgtcacagcttcccttggctaggaaagggaattccctgaccccttgtgcttcccgggtgaggcgatgtctcgccctgcttcggctcacgctcggtgggctgcacccactgtccaacaagccccagtgagatgaagccggtatctcagttggaaatgcagaaatcatccgtcttgtgcgttgctcacgctgggggctgtagactggagctgttcctatttggccatcttggaacaggaatcaaaggaaattttttaaaaatcccatttatgatagcatcaaaaagagtacaatagttaggaataaatttaaccaaggatgtaataatgtgcacactgaaaattataaaacattgatgaaagaaattcaagaagacacaaatcaatggaaagataccttatgtttatggattggaagaatcaatattattaaaatgttcatactgcctgaagcaatacacagattcaacacaatccctattgaaattccaatggcatttttcacagaatagaaaaaaaaattctaaaatgtggatgaaactagaagacattatattaagtgaaatatactagacacagatagataaatactgtatgatttcacttatatatggaatctaaaaaaaatgttcagttcataaaagcagagagtaaaacagtggttgacagtgggtgggagacctggagagatgttggtcaaagtgtatgaacttacagttgtaagatgaataagttctggataccggacatacagcatggcaactatagttaataataatgtattgaatatttgaaatatgctataagaatagatcttaagcattctcaccacatacccaaaaaagtaactatgtgaggtgatggatattttacttagcttgattgtggtaataatttcacaatgtgtacatttatcagaatatcacattgtataccttgaatatataccatttttatttgccaattatacttcaaggcagaaaaaaataaaattagagtagaaacaaaagcttggaggtctgaaatgttactaaaagtgtaacattttccttttttcaatattcttgccacatggtgggtaggtccttttagtctgaagattcaagtctgtcttatttgggggatattttcttcaattagtcccttgattattgatccttctcttttggctgtattctctcctgtgactgctaataggtgtgtaaatcagtaccaggcacataataagcacatgttaaatatctgttgatcgtataaattgatcctggatttgcttgatcagttttccgtgtatcttacatcttctttcatgatttacaacctagacattttgctgttttcagaacaaattttttgaattgttactgcagaagctgcttttgctcatttatgttctgcttttaaaaaattatgccattttattaaaatatagtttttggaatgttgtcatgttatctaattttttatgtcctctgatgactttgtttaaaattagttcaattatgtcttgtatctgaggatacttattagaaatttttttattactgttattctatcttgtttcccatattaactttgttccattaaggactgtttgtccccattgctttttttgtctcctcactttaactgctgtttcttctcaaaagttctagtcaatgcatatattctattcaacatatatatttagctctagatgtaatcagttttggtatgtgcctccaggtggcatcctgtgcagtcttcatgaagtgaaacccaaagactggtgcccctgtcagttgttctactgcagagactttgtggagtatgtggttggagatgaatctatggttaagggagtggattttttaaaaccaatatgtgaagtataatatacataaagtgcatcaactgtaagcatacaacttgttgtgttttcacaaagtaaacataccatgtagaaccaacacccagattaagaactagagcacgaacagtaccccagaagctcccttctcccttcttttagtcactactcttctccaaaggtggccactgtcctgatttctccacatagattaataaaacatagcaggggccgagagtggtggcacacacctatagtcccagctactcaggaggctgaggtgggaggatcgtttgagcccaggaggtcaaagctgcagtgagtcgtaattgtgccactgcactccagcttgggcgacagagcaagaccctgtctcaagataaataataaaatatagcaggtattctgtttatgtcaagtttctattgctcaaaatgatgtttgtgagattcatctgtggtaaattgtataaatgtagtagtagattgtgaattgtcattactgtattgtattccatgttatgactctcctgtaatttatgcattgcacagttgatgggcatttgggtggtttccagtttaaggtatgaaaagtagtgctgtccaaaacatttttttatatgtcttttggtgaatttgcatacatctgtgggaccataccagagtggattgctggattattagggagttttgttggttggttgtttgccattttgttttaaactccttgtgtcctggtgggaattgttcagtagatactgagaaattgatgatgcaaaagaaaatggatagcagaaggaatgaagttctatgggttttggccctcacaaaagtaaatacatatcttcctacagaaatcaaacaggtttttatggctcaaagccccggaattatacggggcagaataggcgaatgtgcttgcagtcagctggctttaaaagagcctttcttattggaagtatagagaggaaaattcttttccactagcgggaagaaccacttctggtgctcaacatcatgtgcattgctgcagtggagaagaaaaaagagggaagcgttttcattgggctcatactgcttatgataggcctggcagagtcttgcttttggcaactattgagtatgaatggccagtctctacttgtaaagagaggtcattggacttaaatggaattaatggaagtaaaatgttctcaggttgttactgcaaatcattcatgtagtcagtgccaggggttaaacaattctcgcctcttttctagtctgtcaccttcaaaactaccagcagaaatcttgctcgagccatgtgtatgaagaacctcaagctcactattatcatcatcatcgtatcaattgtaagtttttgtccttttagtgtatggctttatttttcaatctctaagaaattaggtactagaattatttctcaatgattaacactctgaaatgagctacatatgtcttttaatagtgaaacacatgaccaggcagtggctttcctatgaagtcactatgaaatatctctacttaaacccctccttcctattgagaattattatatattctcaataggaagagatctataaaactgacctcacagaaatgtagttattttaaataaagacatttctggtttatatgtaatgggtttattgtttttatttttaaattaattatgtatttttaaagttttaatttctaatatggcaaatgctgataattataatcccccttaaacaagaactctttggagtcctcagtaatttttgagtgtgtaaagaggtcctaaaccacaactttaaaaactattgctaacaggtggggggtgctttaccctgttcatggtcagataaagttgcctttcctccccatcctccagtcatgtccagaagcccaaagttacctccaagcagataactctgaccctgcttctcctctaccacagcttgagggtcctctgccttagacagctggatttatctaaaagagaagagcagtcatagatctgtagattttatactggaagtaattgtcatggccttgaatggttccttgctcaggtttctctttctaatatcacattttaggctcctgagcttagcttcttacttattatttggtctgggagtttaggttgatttgtgcagctgaattgttaaattcagaatatatttactgattacttattacatgcagagcacagctctaaatgcaatatcaatctttgcgaaaaggtgttgtcacctaacgagatgtacttcagcttgaaaaatccttatattacagctgtgacaaatagtcaactttacatcaagttggtaaactttacatttgtggcatgtgtatgtgtgagtatgtgtgtgtatgtgtgaatatgatgtcagaagttcaacctattcattaataaacagaatttgctgtaatctgccccccaaccctggcaatatttatagttccctacaaggcaaaatgctttgctcacttttggagcaaagggcatgcaattcatcaatgcatccttttccaagcttgcaaataatgaaatcagtcacttaaagatctcaaaaagttgtaatttaaagcaaaataaagccaggcataggggcttatgcctgtaatcccagcactttgggaagctgaggcaggaggattgcttgaggccaagagtttgaagccagcctggtcaacatagtgacaccctatctctacaaaaataaaaaataaaaaataaataaaataaagtgactaatgcagtgaacctaatgtttaaaatctattttttgtgatataataatgtgaacaagtagtgacttttataatataatttaaaattataatctagaattaaaaagcaaacacatctgtaatagcaccagtatttttgcagtgttacttacatcatctgcttttcattgttttggtcatcgtaattattgtgtcattatccactgaacagttcgtagcagtgttcttgctcataagtgatatagatgaaagccttctactcaggcttttaaaatatattcttatattaatcaaaaataaaattcatgtgcaaaacctaaaaatataattaatgaaaccatacttcaggagaattatggttatttgtgatttttttatgacttgttaatgacacatcagtatgagttgctcatttagccttgattctgccgagttaccagtgaagagcaacaaccccactgctttctctcccactgaaggaaacgctagagttcaagtgggtgtgagttataccaaaaacgacaatgttaactacacttctgtcttggaaaatacttgtttagtgtgttccattactacataactgctactctaatggaatcagaagtatttcttaataaggctctactttcctatatatattatttagaataatatgattgattcaagaaaataaaattgctctcctcgtccctccaggtgttcatctatatcattgtttcacctctctgtggtggatttacatggccaagctgtgtgaagaaataggaaagaagaagttaccattaaccaaggatatgagagaacaaggagttaaaagcaatccatgtgactcaagcctttcacatactgacagatggtatctgccagtctcttcaaccctcttctcactttttaaaatcttgttccatgcctccaggtttatctttgtcttatctaccagtttattcctgtgaacttcagattgaaccattcattgcagcagtagccttaaaaaggcttttgtttatttctttggtttgttaactagtgtcatctatttagagaaacatttttgtttttaattgctcaaagctgtcgccgctagtcttatgagctatctactaaaactatggagaaactttgtatgtgcacacaaaagtattcaagagacagtattgctaacatctcatcttaatgtcttttgttattgagaagttttaggtgcttcaaaacaatataaatggataatagttgttatttggggaattgtaatgatgttggtgctgcttccttctaagagctcagacaagtaaagtatgaaacattcttatttcagttagatggggaacattttgctagcccattagaagcacacagaattatccttgtcctcctaatattgactttcaggaataaagttcagtgtgctgatcattcacaatacagtggatagcttgatatcttctgttttcccattgcagttgatttgagaagatgaaggtttaaatattgttgaaagttgcagttttttaaatgtgttcctttttcttctgtgaatatttagggcaatcgtgtcgctaatagaatatgtagtagagggggtggggaggtaaattcctctgacttgccaaagaaaaagaagggaaccacagtggatatgctagcattttagctgtgcaaagggaggtagtgtgggaaaagtgtttccattctgggaaaagcccaaaccgaatacggtcagcagtcaactccagggtttgggcttgattcctgttgaataatagttttgagcattctttgtggttaaataaattcttaaatctgcctagttttgatgaattcttttgtgaaacttgaaagagaatagacagtatgacatatagaattaatacaaaacagtttaacaaccatttaactgcagtgtaagaaaattggactgtaatcatatcgctactggcatctgttatctagtatgcatttctggtgtgtatctgaaaggaagacattttctaccctagatccaattgcatttatttatcaataagtgccattaaattgaaattatattacattttacactttctcaatgaatgaacaaattagtctgtagaatctagccacctgtttagcctagtcatgtgccttgaacatatatgtgtcccataatctggctcatggtacctgttcttctatccaaacctttcaattcatgctacctgattcatttatttgacatagatcttaggcccacttgaactcttttcttgtttatctagcatagcacaaacgtttttccagtcttctttatcaacactaatgcctcttaattgcatcagtatttcctattggaaaatacatctgttccagaaaaacatttggcattcctgaataatttccaaatgtttttaatccaaagaaaaaggtttaaagcttatttccctttcttatacacacctgaataaaattgatgtgcatgttttagggatcaattacctaactgttccttggtctatttatgtataagaatgctttttaaagcacatgtctcattttaaatgacgcacaaactgaagatgttaataaaatttaagagtaatacaatgatttgcttgttttagaagttctttctggaacctaatttcttctgatgacatttgccattgtttacagaacaaaagtattttacttatgcggaaaatatattaagaagtgttacctggagacttccagtaaagatctgtagcatagtctcaggtgtgtagaatttcttcaaaagacacaaatgaacttaaaaaatatatagcccatgctgaaaccaatgaaagattctgagatgatcacacagccttcacaactatcgtcctgagtgcatgatttagacagaactgaaaaagaaccccagggattttcatccagtttagcacaattctgaaaaatctttctatctaaagttaaatgactggttctgaaagagactcaagcggaaggcataatggtgggagggaataattcattatagcaaacagggtacctaaacagaaataaaagaaaaacaggcacaaatcaaatatacaaatagataggtcacaacaaaataatcagtcacttgggacctctgaacgtaaggtggctaaagtcaggtatagaatatatttttgtacaggctgcaataacttaaaaacagcctatttaagttctccctaggttttatccagatttcaactgaaatgtgcattctctaacagacacttagagaaaaataaaagatggttatttatttggttatgaataaagaaagaagtgacaccagctatttctctttacttcaaacccttggcaaaaaaaaaaacagtgttacaatccaaaagtttccttaatagtgaatgtaggtgcctttagataatggtttcttcttgcttgactcttggtatctatcttttctggcctcaagatagacaaagatactgggttgcttcccagggtatcttgatggaaatgaatgtaacaacaacagcagcaccgtagaccctaccaaagtgttctacattagaagcaagtctatgtcttgcaatgccatcttctcaagtataataaacagggtggaagtagtggttgtggttgccatgtatatcagcgtgaatccagtgaagacagcagaggcaagacaagtgttagggaaacaaagagtttaatataggattcaaggttacaaaaatgtgtgacaaactgggaagtgaaggtctggaaggcaggtaccagaagatcagaagaacagtcctagtgctttcacttgaggcagtgacataggcagacaggtcggagcttgctggaaaacctaagaagccctgtatgtctgcttgctgatatggttttgctgtgtccccacccaaatctcgccttgaattttaatccctataatccccacatgtcaagggagggacctggtgggaggtgattggaccatgggggcagtttcctccatgttgttctcatgatagtgagggagttctcatgagatctgatggttttataagtgttcgacagttcctccttcacacactcactctctcctgataccttgtgaagaaggtggctgcttccccttccaccatgattgtaagtttcctgaggcctccccagccttgcgaaactgtgagtcaattaaacctctttcctttattaactgcccagtctcgggtagtatctgtacagtagtatgagagaagactaatacacttgccaaagttggtgtgtgaagagagacatgtggaaaggtttatggaagccacagcttcagtagatctgatgccaagtaccaagtagtaggcttgcagccccagttggttagcatgactaacagtccacagaatgagttggatgtggaatggaaaaggttgaggaaaagctgcgacacaccaggcacctaagcatctttgtatcctttgaagggtactggcctctacttttgttctgctttccaagtctcatataagtgcaactcactgagaaaggctaaccctaaaaccatctagggtaaggggattctatgaaattctcagcttctggcaaaagcaatggtgccagtctagcatagcccagttcctcctagactcattcatagtattggctctactgctttgtcaagacaattttggtaagttaaagcattcttctggtcagaatacactgtacaaaattattttgggttcgtgctatttattaagcccaaacaatctaaatccaaaatgctgtgactttttacatctcttccaaagagaaaaaaaatcatggcaatattctgtataagaaaactaacatgcacgggctgacaccatgttttttctttttaaatccccattgcaagtttagaaaagcacaaagaaaactttaagaagtctcatagagaatattgaactcaagactgcaacttacagactttcactgctggccaagatggagtaacagatacagggcatttacctacctgcgtgaaataacacccccggaaagacaaaatatatgaagcaacagttttcaagacactggacactaggcaacaaaggacagtgatctttcgaagagttgaatcctacaattgtaccagcttattctgaggagagagtaactaggtcataatacaatgaggaggaacccaggcagagcctggcagattccctgggttgagatgtgacttgagatttccaggaagatcaagacagatgtctttgcaggatagagtactagagaggagagagctgcacagaaaggactctagatctgaggaaactactcaatggcagagaaagaaccacccgaaaaaagattagacggaagagtttcctgcactcacgcagtaccagaagtagtgcctgtatatgcattcaaactggaaaatttcatgaatcacagagtatttgatagagtacccagaaaggtcttacctcagtaatggagaataaataaccctagtccagagcttctcaaccttggcactgttggcatttggagccagatattttttgtcatgtggggctgtcctgtgcattgtattatagtattttgccagcatccctggccatcaatctactagatgccagggccactgtcttcccagttctgacaaccaaaaaccttccaaatgatttcacaaagttgggaagacaaaattgtccctgattgagaaccattgctgtagactaaacacacctctcatccagcttgatacattttaaaagtaagacctgagatgatgaaattgttttccaggtaactgcatcccagaacaaacctcaagaatatatttatggaaacacaaacacagcacgcaaattaaaattcaatgtgtaaggcagcaaatacaaaattaccggtcacacaaagaagcaggaaaatatgaccaacgataagataaaaaaatttatcaatttaaataaatggagaactgacatgttagaattagcaaagatataaaaacagctattaatgttgtattacatgtgttctaaaaggtaagcagaggcatgaaataaaaaggcacatttaatttctagaaattaagactaggatatctgagatgtaaaatacacaggattggattaatgacctagtagacatagcagaagtagaaattactgaccttgaagactaagcaatagaaactctccaaatgaaacacatcaattaaaagataaagtgttaaatgtcaaagtgtatttttagagtcaactcttatctttaagaaactcacttaaaatgttaatataggttaaaagtaaaagcatgggaaaatataccatgcagacagtaatgagaaaactgcagtagatgtcagagcaaaggatattgccagggatagagaagattgtttcataatgataagtgggtaaattcatcaggtgtcagggtttttagggtttaaggttggggattaggattaccagtttaaaatctaggagttaggttttgggcttcctctggagcctacatggtctgagaaggaaaagcaatgaaatacttcaggtttggtggtacttcagattctgatcttcaatctgcctgttaacatacatttttagtcttcaaattagctgctccatacattccatctaggatttatagttgtgggagagacacaatagagtgtgctttctccatcttgcccagaatttgaactccagtgcaaaataaccctaaccccaaaacttggtgttataaaacaattgcggtgttttatttcctaaggttcaggttcaggtgtaagctttgggattaagaaattgagttcaggttagggtttgagttcagcttgagcttctgttttagaattagtgctgacatcagggattgggttgggattattattgaggtttggattcatactcagattgaaaggttttggggttttttttgtttcggttttttttttagacagagtcttgctctgtcacccaggctggagtgcagtggcacaatcttggctcactgcaacctccgcctcctggattcaagcaattctcctgtttcagcttcccaagtagctgggactacaagcacacaccaccacgcctggctaatttttgtatttttagtagagacagggtttcaccatcttggccaggctggcctcgaactccttacctcaagtgatccacctgcctcggcctcccaaagtgctgggattataggcatgagccactgcacccagccagattgaaggttttgaattggaatcaagttcaaatttaggattgaggtcatagtcagggtttggttaggtttaggattgatcaggttacaggcatgggttcgggtttaggggttttggtaaggttctagctcaggtttgagtttaggcttagagtttaggggttccatttcaagttaagactctggatcagttttatggcttagggatttgggttcaagtctgggttagattttgagtttggaattaaggtttatatttatggttagggtttagggtataaggcttgggttagggttagtgtggatgttgagtctgaggtttgggcttagtttgaaatttggtttgggctcaggcttgtactctgacttgactttgattttagggtgtatggattcagacttgggttctggttcaggttcagagtttggatttgtatttgtgttaggatttgggattggattaaaggacattattgaaatgcagtttggttctgggctggagttaaggtagggatttggttcagtttgaggtctgtgttgaagctcgggctctgagtccagttcatgttggagctctgactagagctcagtttggactagggcttgggctctggctgagattgagattaggacaggggcttaggatggagctaggtgcaggatagttctccagatatccttggaccatcccagttctcccttctttctcactcgtaattttcaagaataattgtagaatgtctgggaatgcaacaccctgagataaggaaggctagttggaacagcccaggctttgttccagtgcccctcacccagaacaggatgtcatacgacgctttagacaagtagttcctgtactcccagggtataaaatccagagcaaactgctttccaggatccttcaattgcagtgcaagtgaggcatgcacagacaagactctatctgccctgagcagctttcctgaaccttgggggactggctcacagtgaatcctaggcttctgttttctcttactgcctatttgtaattaatacatttgcttcatcatataacttgtctcaccagacccagacaagttggtaagcagtgcacagtgaacctgctttatgcaagtttatggctggggctggaaatggtaatgggattgggattagctaggtttggattctagttcaggttcagatttggatttagggttttcatgttcaggttcaggctctatcttgggtttggagtttagtagtttgggttcaaggttcaggtctggattcagatttacaatttggggtttgggttcaggattatgatttaggtttggagtcggtgctggagtgattcacatttgggcttgagctctcactcaggtttagttttaagttttaagcctgaggtatcactctcattcaatgtcagaatttaagagcaaatttgattggaatttggtttaagattacagttagtgttagggttgagttcacggtttaagtcgtgttttgagtttaggtttagattggatttatggtttgggcgtgggcttgggctcagactcctggcaatggttttatgttcagggatttaggcttgggtacgaattcaggttagagttgctatttggctccaggtcaaactcagggcatgggtcaggtattaggtatatgattggaatagaggtccgggtttgggtgtggtcttgtttggatgcaggggttgacttgagttcaagtttggatttaggggtctgggctgaggacaatgttggctctaatttatggttgtggttggttttggaatgtggttcaggttagagttttgggctcaggtttgaactagtgctctgctcacactggagttggtgccatggatggggacggggtttgggccagtgttgaggctgggtttgagtttgggaccatgaaaaggttgaagttgaggttagtgttgggatcaggatttgggtaaaggatcaggtcagggtttggaattaagtcaggatatgatccctcagcctgggccttgcctcagacttggttttagagtttgggttttgaattcaggttagtggtcaggtgcagtgttctagtcatgtttggagtttgagtttagggttagagtatcaatttgagtttgggttcatgcttaggccttcttttgggggctaggttgaggtcaaggtgtagctcaggcatagggtttaggtttgggtttggttttaggattcaggcttgggctggggtgtagttaggttccagttaggttctagttcaggatttcggagttaaattttaggttcacattcagagtttggattgcggttcacattcatgcccagacttgggctttgactccatttcaatattatggctaagggctttggattaggattttgattggggttcaggttttgcctttaggtttgagtcaggctttaatgtttagagtttgagtaaattatgctttaatttcagagtttggatttaggttatatttcaggtttagggctttagtttggtgtagttgtggttggggacagggtttggaacccaggtttggttctgggttgaagtcagcattgtggttgggattcaggttggtgtttggttcaaaatgggttttgggatttggctttggctcaagctcaggctctatttctagcttgacagctcaagctctcactggtgctgggactgggattgatgtcaagtgtgggtgtgggatgtcagggttgggtttggggttgggggcaggatttgaattgggttttttatggtgctcaggcttgagtcctgacttggctttgttttggggtttagggattccagcttgggttcaggctttagaaatttgagttaggttctagttcaggtttgtgtatatgggtttagattggaggttgaggttggagtttttggttttaagaatttagggttgggtatgtggttggggttaggaacggttggggacagagttcaagtcagggtcgatttgggggttggggtaagggtttggactcagcttggactcagttctcaggctggggcttggcatgggctggagctggcacttggacttggcctgttctttgaatgtactggggctaaggcttagcctgaattggggatagggttcaggttgtgactagagttttttgtttctgattatgtttggattagggttggggttgaggtcaaagttcggggttggaatttcatcaggagtattgatcaggattcagatcaagctctgattcaggcttggtttgggcatttaagggtatgagttcttgttcatgtttacagtttgggtcctggttcatgtcttagggttaaggttaattttagggttgaagttcaggttcatattctggttgagagttcacctttgggtttgagttggctttacagtttagggttcatgtttgtgttctcctttggatttgtctttagggtttagatgtgaggtctgagtagtagtcaagtacgattttaaagtttagggttggtgttgtggtcagagttgcttttggtgtagtgtctaggttcatgctcaggtttgtaccagggctgaagctagggcttggcttggggttgggttagggttagggtagggttggggtgctggttttgactagaacttgggctaggattgagttggggctgctttggattattgcgattgggtcgtggaaccccagattcaaactcgtgtacccaatgcacagctgaagccaaacaccgagacaccagttcttagagatagagaaaggtttattagattttgccaaagcaagaaggcgggagagcaagatctgtcaaatctgccttaacaaaaagatgcagcaaggagtttttatgcagctagggaataagggagtatttcagagaactgaagggcaacgtctgtgtttcttcaatctcagataacacctggaacaaccagacttctgggcatcaaaacctggtcccaatgtccttcaaaacattcattccttttgccattttttttttttcgtggccctgaagttatctcctcctgcttgacaaagaaagaatatgtcagtagtttataattatattgtggaaacaaggaataatgggccaaaaatgagtagttaacatgtttaagcagtggtctgatcagaattttcattatttcagtcactaaaatgctgggatgctgaaatctcaaggggcctgattacagttggattagggtggcatggagtcaaagttgggaacagcattggccttgatatggactggtgttctgtcttgtttaggcttgggctctgacttgggcttggttttaggttcaggttcaaatgttcaggttcaggttctgacttgtgttcagtgtttggcttttagttgggatttagtattagggttagtattaggatgggcttggggtttggcttgtttgtcaggtcaatgttagaattggggttctagggctaagttttagggtttaggggttcaagtacatgttctggtttgcccacatgtaagtatagtgttctgggattttggtggggttcagctttgggtttgattggggtttgtggttgggcttgaacttggactctcacttgtgctcagtttcaatgtataggggggttcgtgtgctggttcagttttagtgttgtgtttcaaagaccagagccaagatcacaatggtagaaggcagatttaacccagaggagagcagaccccagagtgcagggggcggggtcctgagcttaaagggtggcatcgccctggagttagaggaaacagcctggccccaaatggtgaagctgtggaaacaaaaggctgagccacatgagcataggcagaggcctgagcttcaggcccagggtgagcagtctcatccttagatggaggagcagtgggtgcagctgggaacaaaagaatgagccatgcccccagagggcagaaccgcaggcccagatgtcagtttcatggttaagggtttaggtttgggttagagtttgggattagtgtttatggttaaaattagaggtacagtaatggttgtaattggagttaggtttgggtttggctttgactttggggcttggtatggttcaggtttatgcctgggttgggctcctgatttaagcttggttttaaagtttagaagtttggactaaggttttattcagcttcaatgtttggcttcaggtttcagcttgggtttagagtttaggttttgggtcaggttacattcggtttaaagtttgagtttgtgttcaattctggttaaggattttggattggtgtaggggtcagggttcaggtcatgatctgtttggaattcagagtttggatttgggttcaagtttgggatcgaggtttatggtaagggttagggttggaattggagttggggtttgattcagatttggattgcagtttatgatgtcctggcctgtgcataggctctgaatgaagcttgactttagagtttagggggttgaattagggttttggttcatgttcatagttcaccttctggttcaacttcaggttggtattgatgttatggatgggatcaggtttgatgtcagtgtctgattggaatctggttggggtttgggattagactcttgacttgggctggattttagggtataggactttggcctcaatttgggttagggtttagtgtttaggactagggttcagatgtggataggatttgtggttttgtattgaggtcacggttatgattgacaaacaggtcacataaagagtttaggattgtggttgggacttgggcttaggctcaggatagggttaataggtttcagttggatcctagtttacatttggattaagtgtcaagatttctggatttgggttcaagtgtggggatggttttgtagcagtgaaacagcaaaaaaactaacataactaattctatttttgtttaagggacatttacccattcctgcacataggctaggataattttagagcactgagataatatggaaaaacagcaatcacgtagcttttaaaactaactctgagattaaagaaaaaagcatgtaaacaactaactgtgttttgttaaaagacttataggagcattgtgacctgaccaaggacaaagaatttcccaacctcctcgggccctcactggcgcccagatgtctgaagttgttggtcacttctagatcccaactccttcctctacctcttgcctttaacattaaaagaacctaaaatttatagtgacttaagatgatactttaggatgctagcatgtcattttctaggtttgctggctttcttaataaacctgcttttcctctcacctcctgtctcttgagttttgtctttcaagtagcaagcagctgaacctgggttcagttacaatttcaggatacaggctcaattctggtttaggacttacggtgggtgttaccactagggttagggtgaaattgatgttgagtttcactttgggataatattgagttttgattatggtttcagatttaggcactcaagttgaactggggaaaattgagttagggttagagtcagaagtctaggtcaggttaaaggtcaggatcaaagttaggggtcagagattgggtcagggtcagggtctgggttataaatatgggttggggttggtgtctggatctgggttgggtaggggttggggtcagggtcagggttggatcagggtcagtgtcagcatagggttaagtttaggggttagggttaggttttggatcagtgttggggtcagggtcgttatcacattttcctcattagtttagctttataataagtgttagggtacagatgtgtgagtttcttaagtttgtgtttattcagtgttgtctattataggtttagaaacagtttgctgggaatttaattgagattgcactgaatatatagatcaactttgaaggaatttttatcttaactatgtctagtctaccaatggtgaataaggaatatctctgcatttatttacgttttgtttcttttaactgtgtttctagtttttatgaatgcatatgtgtacctttttaaaaaatttatacttaagaactttaattttgaggcctgctgttgtaaatgatattgatttttttaaatactgtattccagctttcaaattccagttttatccatacataattgctgatacgtaggacatcaattgacttttgtccgttgaccatctactttgctttttatctctatccattttggtcaaggcaagggatggtaggctctctttcagttttaatttccaaaatcatggcatggaattatcagaacaatggattttcagagattcacggggaccgcagaccgcagcctatgggcaccactaaatcgtgagcgcctgagcatcctgtactgcccccaacggcctgtaggggcatgcaaacccacctttttggaccctcatgaggcccccatgttctctgcgtagacatccggcacctccacagtgaggaccaagctttgttctcaggtttcacccaggaggtgctgctgtggctacaggacagctgggggccatgcccagggaggacccaaatctccttctcctcaggacccacctgggagaccctctgtggctaaggaacacctgggggtcgtgcccagggaggacccaagcctccttctgctcaggagggacctggggaagcaccctggcttcaggacacctgaaggtgaggaataaggttcctgtccatgccctgagtgcagaggagggaacgctgccatatgttttactttcctcatgttgttagggatccttggggtgttacttttctggccggaaacctttgtggctagtggagcctttgctgcagttttaccctggcccgctggactcgttctacccacttggcctggtaggctgcactcagctcatgctactggcctggagcccatgcctgccaagggcgagtcaggcgtggagtggtgaggggtgtctgagcgattgtagggtctggccactgcacagcaggcagctcagggtgccggcatgggtgctggctctctgcaaggctgtagctggactctcttttcggactcagcccacctgcacccaggtgaaataaacagccttggtgctcacacaaagcctgtttggtggtctcttcacgctgacgcgcgtgacaccaatgatgaccttaagtgatttttaattaacttcagcttaataggccatcattttcaggacccaactgttaaaagacaaaattacagcacatctaggtttgcagatcttaattggcttttgtttgagattctagaatcaggcagcagtccggaccaaaaatggtccagaatgctctgccacatgacatctgcaggttatgtttataaccacagaaaagaaagtgacatacagaaaacaagtgaaatacagagacagctccattggttacagcctggatttgcctttatggaacctagtttgaacagttggccgcctgccattggctgacacttggcagctgtgattggtttagcctcagctatttgttataaagacagatttctaagtcagattttcagtttgtttatatactaacttaggttgtagttctttacaaggactcgttgggaggcttctaaagcccaaatttagtttaacaactccctccttttggtcagccttttaattttgagaaattgaccaaaacttttgggcattgtcaccatgactccactctctgtcatcattataaatgggcttatttggtctcagtatggaattcagaagttcttatttggtctcagttcccactgggcaatagcagaacagtgagttttgtaagatggaaacaaggaaacagaacaatggaaaataacagctgattggttatgtaaaccaaaaataagattctaaggcccccaaccacctgaatggactcctctcagccaaggggattgcagagttaacctgaaaatctagttcagaccattgtggaagagggggttggacatgcctcattacacccctccagcattaacatcaacacagaccttaggtctgataagaaacgtttataatctttttttctctgaagcctgctacttggaggcttcatctgcataataaaacctaggtctccataaccccttatccacccagacattcctttctactgataataactctttcaactaattcccaatcagaaaatttttaaatctatctatgacctggaagcccccaccccgagttgttccacctttccagatcaaaccagtgtaaatcttacatgtgttgattgatgtattatgtctccctaaaatgtataaagcaagctgtacccttaccaacttgggtaaatgtcatcgggactccctgaggctgtgtcacgggtgtgtccttaatcttgacaaaataaactttctaaattcactgagacctgtctcagatattttgggttcagttaatatcaggtccctttttgggtaagggttaaagcagaggggatttccttatgctgactcaggtagacgggaatcctttctttttcaggaaacactggtctgttttgggatttatctgcttccttaacacttcagtttggttgtgtggcatttggcgtcagttattccatcctggtttggcctggtctgttgtggcctagtgcaggagcccagttaataactctccccttttggtcaggttctcacctaggtgaccaaaacatagggcattagtagtactctcagtcaccatcattttgggtttctggtctcaatgtaacgccaaaggttcttgccttagccacaccaaagaattgatgtggcggcagccgcggtgagagagagacacggatcagactgagagaaaaaagctgtaggctttattgagcagagtggcagtacaaagcttccacagcgtgaagggtcctgggccggtagccagtgttagattttttgatcacccctttaaaccctttaaggcgggaaatacgtgcggcgggaagatgttaccagagcgagaaacaaagacaattaacatgtatcagatctgaggaaaccggaattgtaacttaaggttatctactttatgaccttgcagcggcatggcaaaggagacaggatctcacaggattttacaaactgtgtttacaaggaatcggaattgggagcatagataaggtttgctggtcacagaaaaacgggcttttaacattcctttcagtttcaggggagggggaagggagagagggagcgaggacacagggaagcttacagcaaaagtttcgctgtttatagctttcttggggaagaaaacacatgcacaaattctgatgttaggaatattttaagcatatatcttcaatattattcatccaggaccaaagtaagtcctgttgcagaaaatgagtttcatagctttctgagcccctgctagacccaggaagcccagctggcacctcctctcatcaacacatcgtttcagtaaagtcaagaaaactttattccattattgttaccagtggcaggtatccaagttaccctgagttactaacagtgaatccatatgtgtctgcagcaacttcagttcttgcctccttaggagaaagaattcgactgagggacataaagtggaagaagagaccaaggcgagttttagaagaagagtgtaagtttattttaaaaaggcttatagaacaggaaaggaaggaaaattcgctttgaaagagacccaagtaggcatctgaaggtcaaagacagcatttaactttgatcctaggactttataggctcacctctttcccatgatttttcccttagggtgggctgcccgcatgcacagtgccctccttacccttgggaactgagcacttgccgtctttttaggaagcttgtacgcgtgcccatctgaggctttcctctcttttctggtggagtgtccccagaaggtcatacttcaccattttgtctcttaagcacatgcccaggaagtttcttctccctgtcatttgcattcaattaacacttcaatgttaacagctgtggatcatcaggagattctctctccctggtgccctggtgctggctgccaaattaaaaaacctgcttgtaacagaagttgaatggagctcatatctacagatatttaggtctgagtcttctgggcagctgtcctcatcttagctcaagtaaactgtaaaattctattttgtgtctcagcttcttcctttaggtcaacaatatgaacatacttcaatatggtacatttgttcctgatgagctacttctgttgtacaatcaaatgtaaggaagtgtcaatgaaaacagtcaaactctgtaaaacatttgaagagatttattctgagccaaatatgagtgactatggttaggacacagcccttaggaggtcctgagaacatgtaccaaggtggtcagggtacgccttgttattatacattttagggagacatggcacttcaatcacatacatttaagaaatacattggcttgatctataaagctgggacaactcgaaatggggggcttccagcttacaggtagatttaaaatttttctggttgaccattggttgaatttatctagagacctgggatcaatagaaaggaatgtctgggttaagataaaggattttagagacccaagttcttatttgcagaggaagtcttcaggcagtaggcttcacagagaatacgttttaaaatgtttcttatcatacttaaagtctgtgttgatgttaattccaaagaggtataatgaggcatgtctgaccctcacttcccgtcttggcctgaaacagtctctcagattaaattttagagagccttggctgaggaggaagtccatttagaaggttgggagccttaggattttatttttggtttacagaagtgtattttgcttttgatattattaactgtatttcaagtctaacatgttttcctaggagcattaaatactctgtggattttattacacaaataaggcacagatcccattttatcattaccttcattattacctatattgacataatttcaactgaatttggaaacattccagagtctgggcttccaataatcctttgtgatcctctaaaaggtatattacatttttcctcaagacatagcaatatctaaaatcactcatagaatgtcctgccacttttgtttatctaatttcatcaatttctctaaaattgactttgaatatccctttaaactcttctgttttagaaagcatcacaaggagacaccgaatgatcgtggtcacaaaatctgttcatattcttcctttctctgaatattttttgcagtgacaaatatttgtttctgttgtattactgttaaaaggaatgcttggaaacaaagacaaagattcattacaataagtgatccagtcacaataaatcaatttgtcatttggaccttttttttttttctgagatggagtcttgctctgtcacccaggctcgagtgcagtggcgcgatctcggctgactgcaacctccgcctcttgggttcaagcaattctgcctcagcctcctgagtaactgggattacaggtgcctgccaccacacccagctaatttttgtatttttagtagagaccaggtttcaccatgttggccaggctggtctcaaactcctgacctcgtgatccacctgccttggcatcccaaagtgctgggattacaggtgtgagccaccgtgcctggcccttttttattttttaaagttgtacttttgaaaatgttcagcaatgaattgaaatagtctctaaaatgtgattttttccctggtctaaggtgaccagatttctagagagtgaacccaggacagaaccacaccacaagtaaaaaatatgattaataagtttacacgagtatgttattttaacataaaacatgcaaaagaggcacttatttggaattatttattagtctgcattatatacttcacagcatcatgaatgttcttattttttaaatgtaggactagttagtgtcaattactactattagtacaaataattaacaaactatagaaataatccctgaaagtatagtcttaattattagtacaaataaataagcagatgtttgaaaaaaattacgttttgaataaagttattattttaaattagttttagattcacacagaaattagaaagaagaatgcagatttcccctgtagctgcaacctagttttccctcttattaacatattagtatgtatcagatgtcttcttaacatcttacatcatttgttaccattaatgaccagatattaatatgttattactaaataagcccacgttttatttggtttccctcagttctatctttttctattctgggatcccatctcagatcctacaggacatttagttgtcatgtcaggctcttcttgcctatgattgtttctcagactttccttctgatagccttgacagtgtaagaaagactggtcaggtattgtgtagaaaatatctcattgtggtttacttggtatttttctcataattatactggggttacgggtttgggggaagcagatcagatgtgtagtgctattctagtctcttcatgctctcaagatgcattatcaccattaatgttaattttgatcacctggctgaggtagtgtttttaggtttctcactgtgaagttactttttccccatgtccatactgtatgtattcttttggaggaaataagcatgcagagcccacacttaaggagtagggagttagctctacttccttgatggctgagtatctacattaggtatttggaattcttctgtataagatatttctatttggccaatttgcatatttatttaatcatttatttagaccagtatggacaaccagacagttacttcaatcttttggttattatccaattgtacagtattttgttgctttgatttcctacctgtggccattgggagatctttctattggctcctgttttcctttgacataactgcatgttttgttttgttttgttttaacaatttctttctgacacttcaagagtatcctggctcatatatttactgtctcagccctagtttagctatttcttccaagagcactgatttcccttattagagaatggttttaaaaacttatatctggcagctaaatatgctcattgcatcttgtccctcacagctgacaatgcaaggaaatatatatgtgtgtgttctaacctacatatacatgcctaattataaagatttctatgtggatccatctgtgtatatattaagctacatgtgagtttatactgatatctccaatcaatggactctgatccattatcacaagaattattctagcctcccctgcctttcttgtctgtaaattctcactctgacagcaaggaattagcttctaccatctgccatttatttaatcccttgttccagtataaacaccgaatttattgttgttgattcaaattataagttgtgatttaataataaatatatgtttggtctctgtctctatttcctggtacagagctcccaaaacccttacaatttcttgagtgataggggtgctaggagcattttttgttctcatatttggtctttgaccctggtttctgacacagagtttccaaatgccttaaaaatctctcaggtaataggaatgtcttttgctctgctcctggatggcttcaggatggggcgtggtcaccagaaataccaagccatgattagaagcttgtaactttcagcttcatatcctatcctctgaggggaaagggggctggagattgagttaataatcaatcatgcctatgtgataaagcctccataaaaatccctgaaagaggtgggaggatcacttcaggccaggaatttgaggcctgcctaggcaacacagtgagactccatctctacagaaaataagagagttgggtgtggtagtgtgtgcacgtagtcctagctacttgggaaactaaggcagaaggattgcttgagggcgggagttcaaggttgcagtaagctataattgtacccctgcactccaggcttgggatagagcgagactttgtctcttaaaaaatcctaaaagatagggtttaaagagtttctaaattgttaaatacatccatgtgcagggagcatggcaaaccccaactccatgaggacagagcttccgcacttccaaactttgctttgtgtacccccttatctggctgttcatgtgttttctttaccatgtcctttataatgaactggggtcttagtcctttcaggttgctataaaaaaataccatagactgggtaacttttaaacaacataaatttgttgcatataattctggagcctggaaagtccaagatcaaggcactggaagattccatgtctggtgagggctcgtctctcagagatagtaccttctagccatgtcctcacatggcagaatagagaaacaggctccctacagactcttttataagggcacttgtgccattcatgagggcagagccttgattattggggaaatctgtccccagtatttcagtgtaggttctttctgtctttcataagtgtcggccggctgagaaataaagacagacagtacaaagagaggaattttacagctgggctgccgggggtgacatcacatatcagtaggaccatgatgtccacctaagtctcagaccagcaagtttttattaagggtttcagaaagggagggagtgtaagaacagggagtaggtacaaagatcacatgcttcaaaaggcaaaaagcagtgctgctagtaagggtctaacaaagatcacatgcttctgagggaacaggacaaagggcaaaagcagaactactaataagggtctatgttcagcagtgcacatattgtcttgataaacatcttaaataacagaaaacagggtccaagagcagagaaccggtctgaccacaaatttaccagggtgaagtttctccccaccctagtaagcctgagggtactgcaggaaaccagggtgtatctcagtccttatctcaactgcataagacatacattcccagagcggccatttatagacctccccccaggaatgcattcctttcccagggtattgatattaatattccttgctaggaaaagaatttagtggtatctctcctacttgacgcgtccatttataggctctctgcaagaagaaaaatatggctctttttgcctgaccctgcaggcagtcagaccttatggttgtcttcccttgttccctaaaaatcgctgttattctgttctttttcaaggtgcactgatttcatatcattaaaacacacatgttttacaatcaatttatacagtcaacacaattatcacagtggtcctgaggtgacatacatcctcagcttatgaagataacaggattaagagattaaagtaaagacaggcataagaaattataaaagcattatttgggaactgataaatgtccatgaaatcttcacaatttatgttcctctgccacagctccagccagtccctctgtttggggtctctgacttcccacaacacttgacaatgaattacctgtttaaaccatcctcttggaggttaggtttcaacatatgaattttggggggacaccaacattgagatcatattaaccagtaaacataagtaaatgtttccctgagttctatgagccatcatagcaaattatcaatcctgaggaggaggtgtgggactgttcaatttgcagctaagtcatacagaagtatgagtaaactggggatttactagttgtgattggcatctgaagtggggggggcagtctggtgttactgagcccttaaactattaggtatgtaataactccagttagttcatgtcataattgaactatataacacccagctggtgtccagaaagttggagaattggttgatatgggaaaatccctcatatatttggtgtcagaagtgaagtattgagagtatagatgaaaaacaggtttttttttctttttacagatatactggtttcaaaattgactattacccctgggggagagaactttataaaatagagaccactatttatattcagtatattctgcttttagactatagattctactcatttccaaagtgacttaggttagcactttctgcccatcacctgcagtgagtttttccataaatttgtaatacagttagattcctgatcccattctatattttatccttggatactactgcaccctaaatgtttgatttaatttgtatagcttgtgatttattctttgggctgtaaaactatatcagttttataaaatgcatagtgtcaggtatccaccattgaagtaccttcaaatacccaccctatgtaaccactgattcgtttatctctgtaattttgcctttcccaaaatatgatataaaatggggtgaaatggtgggtagcctcttcagactggcttccttcacttagcagtatacatgcaagatttacccatgtcttcgcatgcgtagatagtttattcctttctatttatgaatggtactccattgcatagatgcaccccaatttgatcatgcattcagctattgaaggaaattctgattacattttgaccattatgaatagaactgctgtacataattacatgctggtatatgtttgaacataacttttcaaagcagttgtctaaatacaggcaatttaggagtgcaattgtcagattataaggtgagagttgttcagctttggaaaaaaaaacgcgaaagtgtcttctgaagtgactgtaccattatgcgttctaccagccaatgaatgacagctcctattgttcttcagcctccagcaagtggtttatcagggctcttttagagttcagcagttctaaagggtgtgcagctatctcattgttgttttaatttacaatttcctaatgatatgttgagcacccttttgtatgattatttgctatctttatattttatttggtcaggtgtccatttagctatttactcattttaattgggtttttagttatcttattgcttctttttaagagttctttttgtgttatcattatttttagagacagtgtcttgttatattgctcggactggtctcaaactactagcttcaagccatcctcttgcctcagcctcccaagtaactgggattgcaggcatgagccaccccacccaacatctttttatatttttaatacaattgtttttaccagatatgtattttgtaaatactttctcccagtctgtgtcttgtctttgttctctgaataggctctttctcagagttgaaaatttagttttataaagtctgtgttatcagtattttttcttttgtgatgtggcttttggtattatgtgttaaacctcagcaccaaatccaaggttgcacaggctttcttctagaatgtttatagttttgcatttcaaatttcagcctatggatgattgtgagtgaatttttgcataattttagtttgcatgtacattattttcattccatatggtttctaaataattgttccatcactatttttgaaaaatacacgggatagtgaatttccaaaataatcgcactgagtaaatgaatgctgaattgtattgatttttcaagagagccaagagggggcacacgtccaccgataaactgtgagcaagagcgtcctgtgctgagtcctgacagccaccagatggcatgtgaacccgcctcttctgaccatctcccctcagatggtgggagcagggagacaagaacttcattttcctcaaggctccaggatggagatctaaacttgatactgttcagtggtgaattaaaagcttctgtccacaactcggagtgtagcggagattctgattcagaggattctgcacaggaagggttcatgtagaaaaatataaccccaaaatcccactgttgccattgcaccctgagatcattctcaacatccaagacatagtggctacaatatatattcacacaatggcctctagtagttagtatccactcagtggcccctactactgatggaatcatgtccacacagtggccactaatgaaattcacactcttttgagaattattggtttcacagctttggctgaaatggagcctctataatgaagtttgatgtcatctctactttcctggtatggtattgatatggttgttttataaagtaatttactttccagtaaattcatacttataggaaacatgcaatggcagtacaaaataccttttatcctttctctcagattccccagtggtcactccagtaccagatttgcaacttcacacaaaatactctactgtattttactcaaagcagggacactctcccaggtaaccaccacataacctccaaatcaggaaatcaatatggtttctacctgacaatccaatcagctgacccagttcactttactgcctgtgctgactgtgagaaaaatgtctctttccctttggatccagttttcttttcctggaactgttcctgtgactatctctcagtttcacaaccttggcagatttaaataatagagatgaatccaagctgcctctgtcatagttttgccaatgcaccacaacatagaagtttctctttgcctgaggtagtacctggagttctttgtctcatgaccaagaaagttaaggagtgcagacacaaagggtgaggttggagtgaaagtttaataagccaaagatgaaagctctccactacggagaggggacccagaagagggttgctgtttttacagttgaatgcaaaggcttttataagaaacagatgaggtcttggtatctcatttgcataaggcatgaatttctggtggcgccaccccatctttctagtgcacatgcgggctcttatcttgagttcactacctaattgctttgttcccccttactgtgcatgtgtcaggggacagaattttccattgtgggcatgtctgggcaagtcacctgtgtagcttttcttatctggtgtgctgtagccatgtcttaggcaagtccccttgtgcatgttccttatctgtgcctgcaggctgttcttttgtttgaaaggattcatctgagcacccaccctaactgctgcctgaccgggttttttcctttctcctctctcacttctgccccctgtttcctcctgagcagttgcaaacactgcactcctcagtacagcccaccaggaggaacacagagccacccacccaccacaggtgatctcaacttgataatggcaaaatacacacataaatctcatcctgtcactctcctgatttaatgttcctaatgggtttccactggccttagaacaaggtccatatggcttttcatggtctactggcccatgagtgctcctgcctgctcccctctcccattcagtcagccccaattacctgcagtccaatttgctttcaattacagggacatagcaggcttgtgggtgtctcaggaattttatgcatgttctcttaacccatgcacccagcgcccccaaccttatcaaattttctaagactttgtccggctaattctgttgtagtatgacaagccacagacaaaacccctcagacaccgacttaaagaaggaagtggtttatttggtcgggagcattggcaagactcttgcctcaagagctgagctccccaagtgagcaattcctgtcccttttaagggctcacaactctaagggggtgcacatgagagggtcgtgatcaattgagcaagcagggataggtgactgggggctgcatgcactggtaattagatcagaacaaaacaggacagggattttcacaatgcttttctatacaatgtctgtaatctatagataacataaccaattaggttaggggtcgatctttaactaccaggtccagggtgtggtgccgggctgtctgcttgtggattttatttctgccttttagtttttacttcttctttcttttgatacagaaattgggcataagacaatatgaggggtggtctcctcccttattccccccccactttgagaatctcactcaacagtgggagttctcacttttattctccttacccatgtcttcttgcaagacagatcaatagtgattcatatagtacacttgtgctgaagcattttggtgaactaaggtagcaatgaagctttgtatcatttgaagaagtacaggtagcaaacaagggagcagtaagcaggttcctattactattataactcttattataagaggtttaaatccttctagcgctgggaaccattttccaaacatggctgcaggatcaaatccatgccacacttgcacgggcacatgtgccagttttgtcatatctctaactatgtcttccactacttgcccttgatcatctatgtgtagacagcaattagtaaggttaaatttcccacacacccctccttcagctgctagcaagtagtcgagagccaatctattttgatagatagcatttctcatctgagtttcttgctgggccagtatagtcaaggctctgcctgttttattagtgattatttctaagacagcttgtaaccgtgtgattcagttgatcatgtaaatgggggtccagtatccccatgagctgtcttgtgcctaagtagcaggcccataatattgtatgattctctcagggggccattcatcatctttccaatttcttatagctatgcttctctttttgcaggaagcatacacagggaagcccaggagttcacctgtttttgtgggcagtgggaagaaagatggtctaatagtgccaataacacaactacctgcccactggtcgggtaatttggcgtaactctatgctcccatatccagtataatccagtgggggctgtccactcccggtgggactccaggtgagtccacccattttgcaactttgggaatttactaaatggattcctttctgtgtgatttgaactgcaccaagtgactgtttttgtggtaccattatacagtttctgtcctagacaactaagtagccctacggggtgagtgaattcttttctttctctagctatgcaatattgtccaataattgaggcttttaggacgcagaaattatcagggtgattcttttcagccaggaattcatcaggaactcgtctgtagctactaattctcgggcttctcatggccattgatctcccattacagttcctccacatacataacatgaagtgacattgagagactgggctacatgctcggctaattgcaaaaacaaatttcttgtttttcctggaatttctggtactggcacatttaattcatcatagaaagttggaaacactggctcaggagagcgtctgtaaacttctcctcgaactaagatatttactcaaggatccagtctggccccatcgatttctaaggtcacacgctccccttttttccagtgaggatcaagggggttggttattactagctctaaggggttacaatgtcccttagtacaggaagggccattttttcctttctgaaggtggactggatccttttcattttttatctaagtggcccaaatgacacaagacgagcatccacattcatttctacacagtcttaattcatgacaaatgtacttattttcagtaatatcacctttttcctaactaaaaaagccgcatccccttcctaacttattgctattaatgacagcacaggcatcaaatttcaagattatgtgtttgggcacccctttttcttctgttctggctaatactttactagtatcatttatgagtccccaccagtcttcagtccttaatcttatttcaaaaactgtccacatgggaagctcagaggggtcataacacacatctggtcagtcgttttctgggctacataccttgtactgagtgtcattatataaacatgttccttttaaagttcctaggcattcatagtaactatagaacagaaagattgttttaacttgctgccctacctcggtaacctcatgtatacactgagagcagtctccatgtggagaaaatcagtggaaatttttactatacaagtccaaattataaggaaaatgagtcccatgatgatcttcctcatgcttcagccacgtagaccagtcagcttccgggtgtgactggaacagggcttgttgtcctcctcagagtcactttgcagggtttgtctgggctcggttttgcctcccaggtttcagtggctgcaggtttcacacggctgtggtggatccaggctgggattccttctacctttacagccatggaggtggtcaggaagatggtctgaggtcctttccaccgtggccgcaaaggggctacgttccagtcctttatccacacaagaccacctggggagaaagtatgaattggggcgaataagctgatgggacacctctcatttacccaagttgagattgtttgtgtaatttttcctaaagcctgtagctgtcgctgtaattcaattccacctaactctcagggagtgcctggaagctcccataatataggaggaggcctatgatacagtatatcataaggggagtatcctgttttcttagaaggagtgcatctaattttaaacaataccataggaagggcctgtatgcactttaatcctgtttcctgacatactttccctatttttgatagtataattcattcgctccacctttccggaactttgaggtcagtaggcggcatgtagcttccaagtgattcctaatgcctttgctgtcttctgtaccaagtcagccacaaatgctggcccattatctgagccgattcataagggcagtccaaacctaggaataagatctcagagaagcacacgggttacctcgtaggccttttcagttcgtgttggataagcctccacccacccagagtaagtacacacaagaaccagcaaatacttgttacctccacattttggcatttctgtgaactccacctgaagatcctcaaaaggagccactccataagcttgtatgccgggcggaacagtggggccttgcctatcaatgtgctgtgggcaagtaacgcaccattgtgctactgctttggcaagggctggcaagtgtgagacgtagaagtactgccctaacaatttttcaagtgactcttgtgctagatgagtggtttcatgcatggccaatacgattgtggctcccagcaactgaggcacagctaccctcccatctggcagtctgatccatcctccttttttttacttgccccctttctgagtggaagaagtctttcttccttagaataggtaggtaccaggtcaggtgtttgagggagtaagggggttgctaccgatgcccagtaaggggtagatgctgcttttcaagcttctgagtcagctcgagagtttcctaaggccactgaggtggaagctcgctggtgtcccctgcagtgcatgactgccaccttctgaggtttccacactgcctctaataattgtagaacttcttgttgatattttatgtcctttcccctagagtttaacaggcccttttacttatataatgctccatgcacttgaaggattagaaaggcatatcaagagtcagtgtagatgtttacagtcttaccttcactgagttctagagcccgagttaaagcaatgagctcagccttctgggctgaagtgcctgtggcaatggtttggcttcaatggacagcatccaaagttaccaccgcatatcctgcacatctttctccatgtggattgtgaagttgctcccgtccatgtataactcccagtctgctgatgcccatggctggtcccgaaggtcaggtctgctaggataaactgagtccaacacttctacacagttatgcttgaccgggctctctgatactgggagcagggtggcgggatttagggtgttacggacttcaatggttatgcggggattttcacatagcaagctttggtacttggttaatctagcatttgttagccaatgatgtcctttgctattcatcaaagttaccacagcatggagggcctttatattcaggttttgcccaagggttagtttatctgcttcttgtgctcacagggctgttgctgccagggcccttagacatggtggccagactttggaaacctcatctagttgttttgagagataggccactggccttggctggggccccacagtctgggttaaaactccaactgccattttttctctttctgacacatagagtgtaaagggctttgtcaaatctggtagtcctaggactggggccgacataagtttttcctttaacttacaaaaggcttgctgttgtagaggcccccattcaaaaggctcccggtcgcccccatttgtaaccctgtagaaaggtttggctagtactgcaaagtttggaatccataatctgcaaaaccccacagctcctaggaattcccttacttgccttctggttttaggttccagtaggctgcagatgacctgctttctttctgaccccaggctgcactcccctttctgaacagtaaatcccaggtagcttacctgctgtctgcagatctgagctttcttcttggacaccttatacccacagtcctccaggtgctgaagcagggcatccgtcccttttgcacacccaactgccatggagtgtcccagcagaaggtagtccacatacaggagcaagacacagcctaggtctttagcaggaaacttttgcaggtcttaagccagggcctccccaaagatagtaggggagatcttgaacccttggggaagccaggtccaagtgtactgagtagtgacacctgactccggatcttcccactgaaaggcaaacagcttctggctctcaggagctattttgatgctaaagatggcatcttttaagtccagacaggtaaaccagctgtcctcagccggcagcagccctaacaatgtgtaagggttaggaactgttgggtgcagagtcactgtagcttggttgaccaagcgcaagtcctgtacgatcgatagtccttggtcccttggcttagggaccagggaggagggggtgttcccatggagactggcaaggaactataattccaaacgctttcaagcgcctgagatgaacctggattcctttgagagcttctctgggaactggatactgcttttgtctaattggttgggccccaggcttaacttctatgtgtacaggggcttggttgaccaccagtcccggaggattatcctctgcccatacttggggccatcgcttagctagagctggttttatctcttggcctggctcagttagaaaaagtctccattcttcttcctgggggaccataagggccatgataactcctgttcctggtaactttagctgtaaagagccctgtttgtaaaggagatgttggctgtcagcttgctaagcaagccttttcccagcaagggcacgggacagtcaggcatgtaaaagaactggtgaactatctcaggtccccgcaccgagcaggtctgtggtagacagaaagtgtgcttagtggaaactcctgttgctccgattatatcaatgattttcttggataagggggtgactggggtggtcactactgaatgttcagcaccagtatcaaccaaaaatttaatgtccttgcccccagttgtaatcctgaccatgggctctttgggggcgcttgagcccggtccccttccatccagtagcccttcagccagattgaacaaagctccctcatctttatctgaggtcttttgttgtgaatcaccttgcttttccttcagttgggaacaattatctttccaatgtcctatttccttacaataggcgcactggttacgttgcaagagtgtgccattagactgggtattcttcctggaacccccctttccctctcctttcaggggaattcccctaatggccgtggccagtaagtcggcgttttgcctggcctggcgttcgccttccttacagctttctctgtggcttgttgcatctctattcacaaacacttgattggttatttccagtaactgtgaggtattcatatccacaaacccagcctgtttctgcaattttctcctgatatcttctgtgctttgactaaggccatgttaatcatgcgctgattttcagggttatctggatcaaaacgaatgtacatatggtaagcctcacacagtctttcatagaattgcactgcactttcctcttttcctcggttgaccttagagaccttatttacatttgtagccttttgagcccctttctttagaccttctattaatgcctcatggtaccgtcttagcctctccatgtctggtccctcattcgggtcccattaggggtctgttcctggcagctgaattcttatatattcttgggggttttggtaatcggctgggatgtgctcctctagccacttagttgccgcctggagtacccttcgcctttaatctgtattaaagaggtacatgagcagctggtggcaatcagcccaagtaggattatgagtctgtataatagtttggagcaagtcaattaaagcttgaggcttttcggtataagatggagtattatttttccaattgaggaggtcagcaggggtgaaaggttgatacacaaaggcacgcctttccaccatgtgtccctcctcatctatcccagtatatcgctgctctctcaggggcatttggattccagtcttgggctgtaagcgagctgccatgggaggagtttctcccgcggcttcatttcctcttttgtctactctgggtggtctaggggtgtggttatctggtggaggtgtaggtgctgtgggctcaggggtggggagcccttcctctcgataaggagggggtactgctggtaccaattcctgccatgattcttctagtgttgggtcggacaggacttctggtgctgacttccctcagcaggtggagcgtgaaccttccttaactaactgcccgtttgctactagtactgctgctgcctgtcctcttaaccactgtcgggggtccaaaactagctgtaagcaagaatctatatatgggaacttatctgagtgccctgacttacaggttaccctctgccataccttcaagacaagggacctgtccaggcttccttctgatggccaacccacctctaaattttcctggtgtcatgttgactccatagtctcctttaaatccctttttgaaatttttcaacatagttcctagtggggtgggcttactttgtgcctgatccatgttttctcaagacaaaacaccacgctcacactacacgcacaccacaaaacaaagaacaggtaaaaagggcacacacacacttttacagtttacaccaaaccagaatcaaaaccaaaatcagagtatcaagaaatccaagccaggtcaaaaccaaaaccaaagtatcaagcaatccaagtcaagtcaaaaacaaaaaaaccaaagtgctggcgggggcacgctgtgggtgatcaggccacatttccactaaaatggggtaggcaagttccaaagactagtgttaccaagtttcagatgtctagactccaagtgccagttccttcccagtgttcagccactgcattgatcctccatgggggcctgccacatgctgctctggcgaggcattccaccagggcaattgcctacccgggagcgctctcaggatctgtgttgctcaagctggctggagtccccggcagggatgctccacagggcaggcctaagccacctaaggggctgccttgaccatccattaatcacctcacttcccagtcagggaaccaagaaatgtagcaggacaagccgcagacaaaacccctcagacatcgagttaaagaaggaaacagtttattcggccaggagcatcagcaagacttctgtctcaagagccgagctccccaagtgagcaattcctgtcccttttaagggctcacaactctaacggggtacatgtgagagggtcatgatcaattgagcaagcagggagtacgtgactgggggctgcatgcaccagtaattagcagttgcaagggatttcaggcttaaacacttatgtttatgtaatcaaaaggtacagttaactgacaaaagtgctagtgtatatcttgacaacctacagaaatatttgcaaatatatttctctatacaatggacaattagtaaagtaagcttagatatttaagcagatgaattattaatatttgtcttctaatccataaacatggagtgtctttacatttacttagggtttcttgaatttatttcagcaatattttgtaattttccatgtctaagtcttgaatatttgttaaatttattcttaaaacattattactgttgatttttttttgtttttttgagacagggccttattctgttgcccaggtagggtgtggtagggtgatcatagctcactgcagcttcaaactccttggctccagtaatcctcccaccttggcctcccaaagtactggggttaaagatataagccaccacacccaaccttttttttttgctttctgttttgaaaattccaaaggatgctttatagtcaatgaaaatatagtactttgaattgcccaaaagaggcataatgcataaaaactctaaagtgtaatagtgactcgctgaccatctggctaccagttagttacctcttcaagttgtacctaataacctccagaattgcttttaaataaacttcttaaattgtagcaataaaaatgacaggacacatttaaaaaataactgaaagcttatccaaaggacataagaaatttccaactcttctttcccccccctcttttaatttttttaagacagggtctcactctgttgctcaggcttgagtgcagtggtgccatcacggctgactgcagcctctaattcctgggctcaatcaatcctcctgtcttagcctcagccaccatacccggctaatttttttgtattttttgtagaaacgaggatttgctatgttgtccgggctggtctcaaactcctgggctcaagaaatccacctgccttggcctcccaaagtgctgggattacaggcatgagccaccacacccagcctcaacacttatttctggaatgttatacaaatcaattttttggctaagttatgaatatgtttataatgcaattatttgcataactctagtaatgctatggacagctataagatcgaaatagttttctaaagaaaatactaaatacataaaaacacttatccccattatttacttgtagaacacgttcatttatgactaattttcagcagcattatgtcatcattgctctgattttaaaagtcatatccaaaggataaggcaaaaccacctatgaattgacatatttgtttatctctcagtttgtgaaaatgtccttaatttgttgatgttgcaaacagatttcaactctgccatgcaaaaaacagaagacaatcttctttgcaatgaattttgtagctccattgcatacaaggaacatgctatatatgaaacaaaatagtaactcaagtacaggtcttaaacactgaaagaactaacagtttattacaatttattttattaacaatctaggaagttcacagcctcagcagttctagtgtcatttcaggtgaaatgggaatttaagaatctctgtggagctgtaggtatagcgaaacttttaggtaaaatacgtgcctgcttttggcagcacttgtgaagagatctctctcaaattgacctaattggtttcattctcagcaaaatgacctgggccactcaacatgggtttccttcttcctgatgtttgggcgtgttctctttttacaacatatttatgattcagaagatattcatttgacatcttggcatcagggctttcacagccaatgtacgttttctcctcttcatccattatgttcttaaggaattctactttgattctctaggaacttcagttgtttcttgtcagccctgcagccactgcagccaagtccccatgtagcaccacagcccctattccaaggccgtcccccaccccaagctgcctgccctgtgtgttccagggcagttggaggtattccagcctgttagttttcagaaatgaaattgttgtcttaatttcattttcatatcgtttattgctagtatacagaaatatatttttgtgtattaatattttgtcctgtaactttgcttaatttctttactagttttaacaatttcttgttggttccttatgattttctgtgtatgagatcatgggatctgtgagtaggtagttttacttttttctttcacatatgaatgactttgtatatatatatattttttttttttttttctaattgttctggatggaacttctagtacagtgttgaacacaatgatgaaagtgagcatcagtgctgtgttcctgatcttaaagctttgggtgccaacaattcaggtggtgattgttatgggttttgcataaaggtgttttatcatgtgaagaaaattcgaatcttcagcttattggtggtttttatcattaaatacgttgattatctttaagtactttctgtaacagttgagataaacgtgtttttcccatcattttaattatatagtatacggaaaaggaatggctttagtatgttgaaaaacctttgattttctgaaaaaaaaaaaaaaaaaaaaaaaaagacctcttcattgtggtgtataatgttttcgctatgtaccaaattccacttactatgatttggttaaacattattaagtctatcattatgagttttattaacatttagtttttttgtcctggtgatatcatatgtttgagtcagtactcgattggggttagaaaaaggtatggcttggtgtactatttagggtattagtggttagcagttagagggttagaggttataccaaaaaaaaaaaaaaaacccagaatttttgaaggattatgggctaaggttaagtgtaggatagacgttggggattagggttaaggagttagaatgtcagagcaaagattaggcttagggtgagggttagaattagagattatggttagggttagggttagggttaaagttaggggtcagggttgtgaaaggaaaatatcttgggccccaaaattactaagctaagggataagtcaagctcggaactgctcaggacaaacctgcctcccattcttttcaaagtcatccctctgctaactgaggtagatgaatattctgattgtctcctttggaaaggcttatcagaaactcaacagaatgcaaccatttttctctcacctacctgtgacctagaagcccctccctgcttcaagttgtccctgcctttccagacggaaccactgtacttcctacatatattgaatgatgtctcttgtctccctaaaatgtataaaaccaagctgtgccctgaccaccttcagcacatgtcatcaggactttctgaggctgtgtcaggggcctgcatcctctaccttggcaaaataaaatttctaaattaactgagacctgtctcagattttctgggtttacagggtttagggttgggatttggttaggtattagagttagggttagggttagggttataagaacccctaagggcttcatataaaggttttacaattaatctgaaagaaagaatccatattctgcaaaacttggccctacccaaaaaggactcaagctgttatttatttactggagttgtcatgtgtaaaataagatctttacaagtgctagagaggctctctgtaccaggggttaaaatacccccaaattgaaccctttatgtgcatatttgttccttagaaggagatacttcatatccacaatcagcaattttattcagtactcgtactgtattttgctctaaaacagccttgttaggactacagattagcaggtcacccacatactggagtagattgctatctgggagaagctgcagggtggacaggtctttagctaagtcctgtccaaaacagtggaggctatctctgaattcctaggacagaatagtgcaagttaactattaagttatttgagtatctaggtcttgctattcaaaagcaaacaaaaattggctatcttgtgtacggaatgcagaaaaaggcatccttaagatcaagtacagtaaaccaagctgcagtggaggaaatttgtccaaaagagactaagggtttgtgacaataggatgaataggaataacagcttcattaataattctaaggtcctgtactagctggtaggagccatctggtttttttgcagcaaaaatgggagtgctgcaatgcaagttgcaagggcacaataatccatgggttaaacattttgttattaggggctttaacactttttgggcttctggtttcaaggggtattggcggttcttgggaacttactgggatttttaagctgaatgatgatgggagcagctgatattgaatggccagaaatagaagtattccagacctcaaacggcacttgttttagaatgtgaggttctatagactgtagcagctcttttagtgaagtgtgagttcatacagttagaaagtggggccttagctataaattgtcttgtaattttgtgagtaagtcatgacctaataatggaacaggagagcttggcatgactaaaaaggagtggctaaagacataaccttcccttttacaagagactggtggtgtgaaacagcctcgttggggttttccatcaatacctgatatagtttagtctctgtgtccccacccaaatctcatgtccaattgtaatccccacatgtcaggggagggacctagtgaggtgattggatcatgggggtggatttcccccatgtttttctcatgataataagttctcatgagatctgatggcttaaaagtgtggcacttccctgttcactctgtctctctcctgccaccatgtaagatgccttctgccataattgtaagtttcctgagatttccccagccatgcacaactgtgagccaattaagcctcttttctttataaattacccagcctcaggtagttccttatagcagcatgaaaatgaactaatacagaaatttggtaccaggaaagtggggcactgctataaagataccagaaaatgtggaagtgactttgggactgggtaacaggcagaggttggaacagtttagagggctgagaagagtacagtaagatgtgggaatgtttggaactttagagacttgttgaatggttttgaccaaaatgctgatagtgatatggacagtgaagttcaggctgacgtggtctcagatggagatgacaaacttattgagaactggagcaaaggtcattcttgctatgctttagcaagaagactggcagcattatgcccctgctctaagggatccatggagctttcaacttgagagacatgatttagggtatctggtggaagaaatttctaagcagcaaagcattcaagatgttgcctggctgctaccaatggcatacagtcatatgcattcacaaagagatggtctgaaatgggaacttatgtttaaaagggaagcagagcataaaagtttggaaaatttgcagcctgagcatgtggtacaaaagaaaaagccagccaggcatggtggctcacacctgtaatcccagcactttgggaggccgaggcaggtggatcatttgaggtcaggagttcaagaccagcctgaccaacattgtgaaaccctgtttctactaaaaatacaaaaattagctgggcatgtggtacacgcctgtaatcccagctactcgggaagctaaggcaggagaactgcttgaacctgggaggcagaggttgcagtgagctgagattgtgccactgcactccagcctgggtgacagagcacgactccatctaaaaataaataaataaataaaaagccattttctggggagaaattcaagctggctgtggaaatttgcataagtaacaaggagccaaatgccaatagccaacacaatgggaaaaaagtcttcaggacatttcagagatatttgtggcagcccatcccatcacaggcccagaggccgaggaagaaaaaatggttccatgggttgggcctagggccctgctggtctgtgcagctttgaggcatggtaccctgcatcccagctgctccagcttcagctgtggctaaaacggaccaaggtacagcttaggccattgcttcagaggtgaaagccccaagtcttggtggcttccacatggtattgggcatgcaggtatgcagaaggcaagagttaaggcttggaagcctccacctagatttcagaggatatatggaaacacctggacgtccaggcataaatctgctgcaggggcagatgttggggtgatcagacccaacaccaggtcatgggggtgacgaagtctggtggagtcaaaggaatgagaaaagacagttagagagagaaactgggtccagggggccaatgtgagtatggaggctgtgaaggccctgagctctggaagcccagactatttattggtgatcaaagaaacaggtggtgagaatgtggggttgaaagggcgcattgcattaagcacaagatttacagctgtaatggtttagaatatgctctgctacttgagataatggagagcaggttcttttaactcaagatacaatcaatcctgggagagcaaggagcaaggagccagcaagtctagacacatttcagagaccatgaggggttttatgctctgagccctggattctatccaagccatgaggggttttgtgctctgagccctggattctatccaagccatgaggggttttatgccctgggcttagattatggtgcatcagggtagccttccaccttttagcacagagcttggtgttccaaaggccatgaggggttttagaccctggaccttggacatgttccaagactcttttacatcatttcagacttgcaagccctgcctctgtttctcccaacactcagcttctcccaacatgccccccttttcttttttgtaaaaccgccacagctctcattgcttgttcttggtggcagctttctcttcagaggtggcttcctcttcagaggcagcttccacatctgcagactaaaaggagacagcacaagcacacaaccaccagaacaaaatccacaaatgtagagcctccaatggccttcaactgtaaatcttttggaatgggataagagtttttaaggatctcagttacaatataaatagagggtgatgtctcccatggtctatttagtgacacagggaaccaaactccttccctggctttaattatcaagataatttgatttttatcaaaggttgaattaatgcaggtaaacaagcaacattcagagcatgtaataaaacgtgtatttatatcaagagtaacatttcctattgctagcacaaccttgaatccaaaaggtcctgtcggagagaaaagaaagagcatttttatccttccttgcctcctcctctctattccttttatatttgccctctcagattttgattggactttgagccatagctaatttccataattcagaatgttcctgtctgtccctgcaaatctctgctagtcttcactactctctacttttgtacctctttaaggcactgaccagtacctctttagggcactgaccttatattgctagtctttgcttttgtacctctttagggcacagaccagtacctctttagggcactgaccttatattactagtctttacttttgtacctctttagggcactgatcagtacctctttagggcactgaccttatattgctagccttcatctatctctatctgtccctgtctgtccctatggtacctgttagttcctgcaagttcctgtctttccctacttagctgtacttacttagctctacttacttagctctacttacttagctctatctcttcctggaaaccttttttatgaccctggatagagctcagaaatccaccctttaagcttcagcaagagataaaacagggactctggacccggcaccagattgaaaggaacaggaagtgctctccccctccccaaagcaggaaaaccagagtttggcccttgcaaatttccactccacatcagcgtcatcctcaatttcctggagtgaactgttgatcattgcaattaacatatttagcaaaacaatgaccattgtaacatcatagactccataaagaacataaccaatgttttcaatgaatttgtggctatagttgatgaccactgatttcactgcagaaagcacaaatgtagcccagaacagtgtcttaaaactctcttcaactgttgtgaaggcttcattttgttttacatcaatgtagtaggagtagaggttgaacattccaatcataaaggccacaaacaccataatgaatatgagcatgaacctgaagatgtctttgactgctcctccaagcgacgtctgcagaggtccaaagctttcatttgctggcaaaatacaagctatcccagagaaactcaaaaccacagcaactgcacaaagaccttcagacaccatacgaggatccgaggggtcccactccctcctggccaaactgtagtatttcacattatctcccaatgttacttttgtcaagtccttcaaagtatcacttgcatcagtgatgctctgggctttggaagcatgccagaatgccctgaatcttgcaatgaatgatgctgataaaattgctaacataccaaaatcaagcatgttccacaactcaaacaaatattccttggggccttgagtccaaatttctttacattcagcccatatcatgcctctgcgctcattaaatctgtttttctctagcagaggaaggttaaccatgaaactgaagcttcaagatgactttacttgcccaggctccttctaagtcctcactttgtcttctgtttctctaaatggggccctctgaataaacaagcctcagattcccctggtcttaccccatgcctcaccctcttcgtaataagtgccttaagaaattcaagtaagcagaatgtttgctttcactttgtcccatcattgttaacctggttcttccgagtgctaagctttcccaccgagcttctttcagttatcctcgggtgtcctttgacaatgcatcctccgctttcacacgctctagtgttccttcaccgggatctttgttgcctcacgttgggcagccaggaatgttggggtgatcggacccaacaccaggtcatgggagcgatgaagtctggtggagtcaaaggaatgagaaaagacagtttgagaaagaaagtgagttcagggggccatcgctaagtatggaggctgtgaaggccccgagctctggaagcccagactatttattggtgatcaaagaaacaggtggtgagaatgtggggttgaaagggcgcattgcattaagcacaagatttacagctgtgatggtttagcatatgctctgctacttgagataatggagagcaggttcttttaactcaagatacaatcaatcctgggagagcaaggagcaaggagccagcaagtctaggcacattccagaggcccctggggggttttgtgccctgagccctggattctatccaagccacgaggggttttatgccctgggcttagattatggtgcatcagggtagccttctaccctttaccacagagcttggtgttccaaaggccacgaggggttttagaccttggaccctggaaatgttccaagactctgttacattatgtcagacatgcaagccctgcctcagcttctctcccaaccctcagcttctcccaacaggcagagccctcatggagaacctctactagagcagtgtgagaacctctactagagcagtgcagaggggaaatgtgggattggaatccccacacagagtccccagtggtgcactgcctggtggagctgtgaaaagagggccaccattatccagacctcagaatggtagatctactgatggcttgcaccatgcacctggaaaagctgcaagcagtcaacaccagcccatgaaagcagctgtgggggctgtaccttgcagaacctcagaggcagagctgcccaaggccttgggagcccatcccttgcatcagtgtggcctggatgtgagacatggagtcacaagagatcattgtgaagctttaagatttaatcattgccctgctgggtttcagacttacatggggcctgtagccccgttgttttggccaatttctcccatttggaatgggaacatatacccaatgcctgtactcccattgtatcttgaagtaacaaacttgttttttattttagaggctcataggtaaaagggacttactttgtctcagatgagactttgtactgtggatttttgagttaatgctgaaatgaattaagactttaggggactattgggaaggcatgattagatttgaaatgtgagaaggacatgaaatttggaagaggccagggaagaatgatattatttgcctctgtccccacccaaatctcatgtcaaattgtaatccccatgtgtcagggagggatctggtgggaggtgattggatcatgggggcagatttcctccatgttgttcttgtgatagtgagttctcctgagatctaatagtttaaaagtgtggcacttcctgatttgctctttctcctgccaccatgtaagatgtgcctggtttccccttcaccttccatcatgattgtaagtttcctgaggcctccccagccgtgtggaactgtgcatcaattaaacctcttttctttataaattacccagcctcaggtagttctttatagcagtgtgaaaatggactaatgcaatacccgtgaggaaaatgaaggactagcacattgggccttaataaacatttaaagctgaataactggcccccatatctataatgaacgttacctctggttcagtctcaatcagatttgcctgaggctcatccatacagatggaaaagataggagcctggaaggcctcaatgtcccatcaatcatctagaggatgactttcagaggcttgatcataatccaggaatagagttagaggtgcttgtccttgcccttgccctcatccttgtcctgcatgacacccctgtcagataggttggtgaggttgtggctgtaacagcctagaaggaagaggtggccctctcctgagagagagagggacacttactcttctaatgatcctcttgtttgcaatgaggacagggtcctgggggtagcttgtaatttggaggtttgggatattctctactctagtgtcctggattcctgcagcgatgataggcccccattctgttagtattatagggatgagtcttgggtttattagctaacgaaaaataatgtatcaatgccattgccatgtaattcgcttggcaatggcatttttcctcctccaattgagcctttttttatttttgaggttgcctcccagtcattgaaaaccttaaaggctgtatttagtaaagtagggaagggaatgtgagtgccttgctctaatttttggagtttttgtctgatgtctggggaagcctgacgtataagctgtacagccagaatggattggcccttagggctttcagggtgtgaatttgtatatttatgcattgcctccaccagtccagcttggaaaagggtggagttctcagatggttcctgagtgatttcttgtaacttagaaaaattaacaggttttatcacagcctttttcattccttccatcaagcacgttattatataatctcatcggcagatgagataacgtttgttattgccaattgggttctctgttgaggacagcttctgcctcaacccttttatcattaggattatgagcatgaactttatttgtctacgcttgagctaaagaccatatgtgtgatttttctttgtgggaatggcacgaatatgtcttgtcaggttaaatcaaaggagttcttgagtgaacttagagggatcctggcaaaatgaatccaatgtgggttgaatttgtgaaagatcagacattggaaaagggacatgaactcaaattgttcccaaatctctatttgccatcttgtggacaggcaaaacatttttgggatttttggaggaatcttagagttgcatatgtgactcccgagtgagtatgtgagggggataaagtatctggttatgggaagggttgattaggggatggagcagatggagaggttgtaggtgaagcaggagcaggctgaggagagtgtggtatgcaaaaggaaggatcgtctaagacatcagaatcagggggagaggaagttccttggaagcatgtatgataatttttatttggggatttggggataaagccaaaaagacctcaacatgtgggacctctgaatgcaaaaaaaaagtatacacttctttttgggagtttgtgggttaaaatggggtcactttttaagactgcaacccaagggcgagtaggaatgacttgcccttgcctggatgaccaggccaggtgtgcccttgtttgagtggtcaactcaaacctaatgggaaggagaactcacccgtaacttgggatatggtgcctctgatgttgaatccaaaattgtgtccacaaccagtggaatgtgaagagttgagattattgtttccaaggcatgggttacagagtgttcagtgaaagtggacttgccaccacaaatggctaattattattttttcatttttttattttgtagagatggagttttaggttttgtttgtttgttttgatattgagtctagctctgtcacccaggctggcgtgcagtggtgcgatctgggctcactgcaacctcaacctcctgggtttaagcaattctcctgccccagcctcctgagtagctgagattataggtgcacaccaccacgccaggctaattttttttttttgtatttttagtagagacgggtttcaccttgttggccatgctggtctcgaactcctgacctcacatgatccacctgccttggcctcccaaatttctgggattacaggtgtgagccactgcacctggctatcagcagatttctaatcataaattttggggaacagaaggtagtgggctcatatatttaaagcagtggaagaaaatagctgtcaaccaagactcctgtacttaaaaggtgagggagaaattaagacatgcccacagaaacaaaagctgagagatttcattacgactaggtctgccctgcaaaaaatgccaaaaggagtccttcaggttgaaatgaagggacactaggcagtaatttgaagccataagaggaaataaatttttttttgagacagagtcttgctctgttgcccagactggagtgcaatggtgcgatttcggcttaccacaacttccacctcccgggttcaagcaattctcctgtctcagcctctctagtagcgccactgcacccagctaattttttgatttttagtggagacggtgtttcgccatgttggccaggctggtcttgaactcctgacctcaggtgatcctcccacctcggcctcccgaagtgctgggattacaggcgtgaaccacctcacctggccagaaataaagatcttagtaaaggtaaatacaagagcagttataaaagctactattaactttgggttgtaattctattttttgttattttacttgatttaagagcctaatacatgataatgagtattagtgtaaaagctagtattactgtaagtgatttgtaacttcacattttgtcttctacataatgtaagagattaatgaatttaaaattattagtttatatttctggacatacaatgtataaatatgtaattttgtaacatcagtaactgaaaaggagtggggatggaactgtacaggggcatagttgtttttttttttttttttttcggagacagggtctcactccgtcacccaggctggagtacagtgatgcaataacggctcatcgcaacctgaacctctcgggcttagctgatactcccacctcagcctcccgaatagctgggactacgggcgtgcatcatcatgcctggctgattgtttttttttttttttttttgtgatggagtctcactccgtcacccagactggagtgccatggcgcaatcttggctcactgcaaactctacctccctggtttaaaagattctcatgcctcagcctcctgagtagctgggattagaggtgaatgccaccacacctggataatatttgtattttttagtagagacggggtttcaccatattgcccaggctggtcgaaaaactcctgggctcaagtgatcatcttgcctcaggctcccaaagttctcacaggcatgagccactgttcctggcctggtttttgtatgttattgaagttaagtgatagaaattcaaattggagtgtcttaatattaggaggttaaatgtaatcccatggtagccacaaagaaaatagcttagctatagaatatccacaaaatgaaatgagaagagaatttagatgtttcactgtaaaaaaaaatcaactaaacacaaaagaagacagtaatgcaggatataagggaccacaaaaaaaagccatagggcatatagaaaacacatggcaaaatcacataagtgagtctctccttatcagtaattattttgaatgtaagtggataaactctccaatcgaaagatagagattggcagaatggattaaaaaaacatgatccaggtgggtggtggaatggggaagatattggtcaaagagtatagtttcagatgggaggaataaagtgttttacttgaaatttattgcacagcatggtcgcatggtgaatgtagggttttggttgcttttttttttttgccttttttgcaacaaggtctcattattttgcttaggatggagtacaatgacacaattacagcttactgtaacgttgaactcatgagctcaagtgatcctcccacctcagcctcttgactaactaggactataggcaccgcacctgactgttttttaatttttaactttgtaagagatggggttttgctgtgttgaccaggctggccttgaacttctcacctcaagtagtcctcccaccttggtctcccaaagtgttgggattacaggcgtgagcttcctgcccagccataaatgtaatttattgcacatttcaaaattgctaagagtaaatgttctcacaacaaagaaaaagtatatgaggtgatggatatgttaactactttgatttaagcacttcaccttatattcctaaattctaatataacattgtactccataaacatatacaattataatttgtcaatgtaccacttaaagaaatgatccaagcctgggcaatgtggcaaaaccctgtccctacaaaacatacaaaaagaaaaaatagccaggtgtggtggtgcccacttatggtcccagctacttagaaggttgaggtgggaggatcacttgagcccaggatgtcagtgagctgtgattgcaccactgcattccagcctgagcaacagagcaagacctgtctcaaaaaataaatacagaaataacatttaaaaatgatccaagtatacactgtctacaagagtctcactttagatctaaagacacaaataggatgaaagtaaaaggatagggaaagacatgtcatgcagatagtaaccagaagagatcaggagtggccatatataaataatccaatcacagaaagattaatactgtataggccgagtgcggtggctcacacctggaatcccagcactttgggggactgaggcgggcaggtctcttgagtccaggagttcaagaccagcctggccaacatgatgaaaccctgtttctactaaaaacacaaaaattagccaggtgtggtggcgaacgcctgtaatcccagccactcgggaggctgaggcacaagaatcacttggacctgggaggtggaggttgcagtaagccatgatcgtgccactgtactccagcttgggcgacagagagagactctgtctcaaaaaaaaaaaaaaaaaaaaactttggaaaaaaaattaatactatataagtccacttatatgaggtacctagcatagacagaaagtagaatggtggttaacaggtggttgtcaagttgaggggaggagggaatggagagttgttggttaagggtacaaagttccagttttgcaagatgaaaaggattgtggagatgggtggtggtgatggttgcacaacaatataatagtacttaatatgttaatatcactgaactgtacacttaaaaatggttaagatggccaagcatggtggctcatgcctgtaattccagcactttgggaggccaaggcaggaggatcacttgaggctaggagttcaagaccagcctgggcaacacagtaagacccattctctaaaataaaagcaaaaaattagccaggtgtggtggtggacacctgtagtcccagctattcaggaggctgaggcaggaggatcgcttgagcccaggtgtttgaggctgcagtgagctatgattgcatcactgcattccagcctgtctcaaaaaaaaaaaaagtataaaccagtgtaagcatgctggatccatacaaatgtataaaccattcttagctcacaggttttaaaaattaggctggatttggcccgtgtcatttgctgacctctgttctacctcatagggctgtgacaatttatgtagtttaacatataacaagtcctctctgtatccatcttgcagataaggaaactgaggctcagagaggttaatgttccttcttcttgtatgcattgttataatttattccatatttgagacagggtctcactctgttgcccaggttggagtgcagtagcctgatcatggcttactgcggcctcaatctccccgggctcaggtaatcctcctacctcagcctcctactgggactacaggtgcataccacgatgcccagctaatttttgtatttttttttttgtagaaacgggatttcaccatgttgcccagggtggtcttgaactcctgggctcaaacaatccacccacctcagcctcccaaagtggtgttattacaggcatgagccatcatgcctggcctattccttttatttaagatgcactttttgcttatatattttcttttctttcttttttctttctttctttcttttttttttttttttttttgagacagagtctttctgtgtcagcaggttggagtgcagtggcatgatcttggctcgctgcaacctctgcctcccgggttcaagtgattctcctgcctcagcctcccaggtagctgggattacaaatgtgcaccaccatgcccagctaatctgtgtatttttagtagagacagggtttcaccatgttggtcaggctggtctcaaactcctgacctcaagggatccatctgcctcggccttgattcttttgtatagaaccacacctggccttggttcttttgtatagtttctatttctcctctgagatttcctatgtattcattgggagcatattttcctttatatatttgagcatagtaagagtatctgctttaaaacctttgctatttccaacaacttattcctggaagtcaatcttcattgattatcttttctcttaagcatgggtgacatagtactctttcttcatgtgtttgataaatttgtttttatcttagaaattgtgaatggtatacattgttgagactgtgtgttctgttatatttctctggagggtgtttaaaaattttttttaattttgtttttgtttgtttgttattttagcaggcagaaaactctgtgtcctgaggtgaacagctgaaacttctgttcaggttatttaaccttagctgggctccttggagttagctggcagatgtatagttcaagggtcatccagagatttgggtagaatttagatgtagaatttggggctctcttctctggtttttcttttgagaatttcctttctccctatccagcccttgtggtctctgcttctgaggttatgatatgggtagtgtggtctgctggtcttgagttagtaaattctggcttcagcaagatagaaggcacactgacagaaagaagctgtcttggtaaggacactagtgcagggatggctccagtgagtagaacagtatatgcttgtagcaggtaagactggagccaagctgattaaaattcaaccccaaagaacacacaagtaataaatacatgaaaagatgcttatcttgactaatactcaaggaagtacaaattagaaccacattgaaatatcttagcctatcagattggcaaagatgaaaaagactgataatgtttactgttggtgaaggttacaggcattcttacattgttggtgagagcaaaagtctgtgcaacactttttatgtagggccatatctcagcatctatcaatattttaaaatgctaaccctaagaccccacaattctacccctagcaatttatcctacagtaggactcactctgttgtttgaagatccatgcccagaattattcacgaaattcacttaaaatagcatatatgcttgaacccaggagtctgaggctgcagcgagctatgatcatgtcactgcactccagcccagcctgggcgacagagcaagactctgtgtctaaagaaatgaaaataaaaataaataaaatagcatatacaggcaacaatccaaatgttcattgcagaaattatgattattattgtttttcttttagaggcagggtgtcactctgttgcccagactaatcttgacctcctgtgatcctcaagagatcctccggtctctgcttcccaaagttcttggattacaggtgtgaggcactgggcctagacattgcagggattattaaaccatggtgcatactaccattaaaggtatgaggtaggttttatatgctgacctagaaagatggtgcaacaccataggggaacaagaaggctgcaaagtggcagcacagcaggagtctttaagaaataggtatttgtttcagcttaagaagtgtctggctgggcgtggtggctcacacctgtaatcccagcacttagggaggcttaggtgggcggatcacttgaggttaggagttcaagaccagcccagtcaacacggtgaaaccccatctctactaaaaatacaaagaaattagctgggcttggtggcaggtggctgtaatcccagctactcaggagctgaggcaggagaatcatctgaacccgggaggccgaggttgcagtgagcctagatcgcaccactgcactccagcctgggtgacagagtaagactcggtcaaaaaaaaaaaaaaaaaagaccgggtgcgaggtggctctcgcctgtaatcccagcactttgggaggcctaggcaggaggatcacaaggtcaggagatcgagaccatcctggccaacatggtgaaaccccatctctactaaaatacaaaaattagccgggtgtgatggcacacgcctgtagtcccagctactcaggaggctgaggcaggggaatcgcttgaaaccaggaggtggaggctgcagtgagccgagatcacgccactgcactccagcctggcgacagagcaagactccatctcaaaaaagaaaagaaaacaaacaaacaaacaaaatccccaaaaagcaaaagtgtctgcatggacttgtgcctaactactcacagtggctacttcttgggggaggtgaaaggggaccctgttaaagaatttttcttctgtattgtttttcttcaactgagtctgcattaattttatatttaatactctccccacccctgatgctcacaggttgctttagctggtggaaggagaacctgcacctctggttttggcaaagtgtagaaggggacaagggcactgctctgcacctgcacaggttcttgcctcctggggtcagtttaatgaatctcagtggtgtttcttgggaagaacacagtggacactcacttgccagtcagtagacaaatcactgaagtccatgtctggcagttctcaatgtcatggggactgtaaggttgtcatgtctcacagttccctgacttagaagattagtggtgacagacacttctcagctctgctcgggagagcagctctgtaatgcgcttgtggtttcagatgtgggcggcctgtgtgaacctgtcgtgcaaagctcacgtcaccaactgctgcagttatctcctgaatcaggctgagggtctttgctgtgcacccagagatagttgggtgacaaatcacctccaggttggggatgcctcagacttgtgatgggactgggcagatgcatctgggaaggtgagtctgtgctttgggcttcccaacctctcaagtcagcatgaaattcagaaggcagagagggacatgtggccctccaactcggggcccagggagccactgtggcatttgagagcgccaccctagctttacctcctctggtgtcctggccttgtgtatctcttagagatggcaaaatttgcagccctgacctcaaggattacaaactaatttccagtcctgtaggggtcatgggttctgctgtggccagtgtggcactgagtttgtcaggcagaatttctaattatggaaggaactctgcttcctcagtgattgaactgacctttgtgggggtgcctttgtggggtgagaatgggcatacttgggcctcagttgtgatggccatggggtggagctgaggtctaggcccagggctgggaaagcttctaccaaccccgaggcatttgggtgttttagggcagaagaggagccaggaggatgggtatgccccactggagctgtgtgtggggcagcaggtgagggtgggattccagagggagggtcaacccagccaagcagaggaaggggaggagagggtttgttttggaaagaacatcaccctctcagtttcctggggtctggatagcctgttcttgtgatgagctggaggatgtgggccctgcttggatcctcctctcccctccctgcccccattttctcttcctgtgatttatgctgttctgggctcaccctcttcccagagctgtcacgctacagctgacaggcagggcaggcgttttaattattattaatttttttttgagacagagtttgagacagtatcaagagtgggtatcctctcagcgtgtcttcaagtagcatcccagagccccgctcctgggtacccacaacatgaacaccgtccagaagcaagggcagcctctgcaggtggggcgggggttggaaaacatttatcaaacggttgagttgggtgcaggggatgcaacatgatcaaacagggtcttgcctccaggagcctcatgtagggacaacgcacagtgatgaccttcaactgcagtggggcagcaaggctgtgggaggggtgttttgggcagagcaggcgacgtgggtacctcttcaccaagacagcaggaagagcacggacatcattttcccgtctcacctccagactcccaggggactgtgccaatatcctcactccagccctggcccatggccactgctcaacccttgggccctgtcagttcagggctgtgcagaaggagagttgcctgtgctcaggctcaggggttccgtccagctaaggaggcctactaggggactggggaaaggcctcatgaaggaccaggcctgtgatggggagggaagatggcagaggggacagtgggaagcagagcagcaggggtctcctccacgcctctctgtacttctcccacccacccttgcctactcccctctgccctgggtatgtgcccttgtccacccaacacctctgcagtgccaagtccagccctgacttcttcctgagctgtggcccagcgttcccacaggcatttacctcacggatgcagcactgcccctcatcctcttctctgaaagtgtgtgggaaatgcttcttggtgccatctctctcccaccctgccttccctgcaccttctctatgaggtgtctgttgtctctgtacttgcctccagctggcctttcagaccccatccctcctgcctcctgcccatccctacccctgtcagcaccttacatactctgtgcccaacagcattggggattcccactgtgctgaaggaagtcctcatgtggtccagagagggagctggcccctgctcccatttccagcaccattttctggcacaggctccatgtccccaggctccagctgcttctggggtaccaaggtctgcatttcttcctcttcccccagcagacagaagaccttgctggacaggtgtccacttcaatagtaacttctgaggctgccagcctcctgaatggtccagaagaaccagacccttccccgcccccattaaaaaagacaaaatatggccaggcatgttggctcatgcctgacatcccagcactttgggaggccaaagcaggtgaatcacttgaggccaggagtacgagaccagcctgacaaacatggtgaaaccctgtgtctactaaaaatacaaaaattagccaggcgtggtgactcatgcttgtaaatgcttgtaatcccagctacttgggaggctgaagcaggaggatcacttgaactcgggaggcagaggttgcagtgagccgagatcacgccactgtgttccagcctgagcgacagagcgagactccgtctaaaaaaaaaaaatatatatatatatacacacatatatatatgcataatagtctctgtgtaacagtaagtggatgcagtaactggtgtgagggcaacttggagagtgtgcttggaggcacagagatgctcagggctgcctggactgcctccatgatggtggcctgctctgtattaggtgagtgttcaggaaaggtgagggcagggcagcccacagcttcacagtggcccagggaagcagggcaggcaggctatgaggcctagtaggcatctgggccagactttgacactgaggccatggaatgggtggggctctgagaacagaccaaagtgatcatgggctgaaggctatgtccacagatccaaggcgggataggctgtgctgggcagtgatgtcagccaggctccccagcgggactgggggtgtcaggggcagctctgtcccaggtggcagacactggtttcccctcctgctctcacaaccggcctgttaccaggtgttgtctgagctgtggtgaggcttccctggtgacattcaggagcagggagcctgtgagtaagggtgtatgcatctgccctgactgcctggccctgtggtcaaggatgggggaaggcagctctgcctgcagctccaccccatttataaagcactgtggtgccttctgctggggcatgtgctgagtggtgcctcgcaggcactgccctcgggaagttcacaggcttatgtggaagctggtgggaatgggccaagaagagaggtgtcaggagccaggtattgggcaggtcccaggtctctgagcctcagtttcttcatctgtaggagggtggtgaccctgccctgctcagcttaccaggtacagatgtaagttttcagtgcagaggaaaagcagagaacttcccctcagatggccatacccccttgtcgctgtacccaactctccggtcctactttgtagctctcaggtgtcacatgtggatcctgccctaccatcccccttccctgtctagaaacgaggcctgctgagcttggagccatcccactccctgctctcaagccgtctgctcctgggttagcctgtggctggcctggcctgattctacatagatgtgggtgtttctccactgctggggcagcagttgtccattctggggcctgggtcagctctcagctgtggccgttgtgcctgtgcttccccaggtcctggtggtgactccaaccctgccctcacatatcccaagagcaggctgactgccttccccattcccacctttccagtaactgctgcaagaacggacagacactgctgcagagaacttgccacggtgtttcatgctgtggctggtggttccaggctgcacgctccattctaggaaagggtgaggcttcctgatcatcagtcttaacaggggactgtcctatgggtacctgtatacgctgccgggagtggggcagagtggggttagagtagtgcctgctgcccattggtttgtgcggtcctttaaggctgtaagtctgtgtgcgtgtctggttttttcctcctcctatcagtaatcagtcttgtataaccaggctggccctgcttcctgcctaggggctatcggtgtaccatctggagttgcaaatggggtgatagggcgtcagcggccttcccacacccaagcacttcctgacacccagcccctcatctctagccaacctctggctcccctagggatcctggggctcaggcctcacgctccagcatccgggggctttgcccttctggtgttgctcttctttgcaggtgccttggaacaggggtgcaacagagttcagaaagtgccatctgttgcatggataccctgctgccaccctcgtccacctttctggggcagaacagttggatgggtctttatttaagaggacaaaagggagagagaatgcatagaggctgggtctggtgctcacgcctgtaatcccaacactttgggaggccaaggcaggtggatcccttgaggtcaggaggtcaagactagcctggccaacatggtgaaaccccgtctctactaaaaatacaaaaaaaaaaaaattagctgggcatggcgggagatgcctgtaatcccagctactcgggaggctgaggcaggataatcacttgaacccaggaggcggaggttgcagtgagccaagatcacaccactgcactctagcctgggtgacagagggagactgtctcaaaaaaaaaaatttgcttagaatttgtctgtgtgaccctgggcaagtcatttcccctccttgggactcagttccttgcctgtgaacggggacagtgcttctcccttacagagctgttgtgagaattaaagtagaaaatgtacctatggtggttgttggtagtgaccagttcccccaaccctgactcccctgcaggatggggcctgggcccgggaatgggggatgggctggcagaggatgactgtcccagagaggagtcttctcggcagatgtggagacctagctgagtcagaggccaggatctaagtttgagggtgttccttacaccctgcagccatgagtctttggctgagtcaaatggcctttctgagctcagttccttatcagtaaagcctggacagtggtccaggacgctggacactgtgtgagtgttaggacacaggacactgtgtgagtgcaggtggggacccatggagcactctgctggggagcaattcatggggagcacccctccagagagggatgatttgcacagggccctcagcccagtcccttgcaggctggaccttggagagtgaggccctgaggcgagacatgggcacctggctcctggcctgcatctgcatctgcacctgtgtctgcttgggagtctctgtcacaggggaaggacaaggtgagggctgggcactaatgtctgtatgaggtgggtggagaactagggcatgtttgggggactgggttgtccgatgtcaagcctctagggaaaggtttggcccaaactgtgctggggcatgtcctctaggggtcagcctggacctcagtctctagtctccctacttttacctccctaccttcattccctggaccgactgtagtctcccttccttcactctcttgacgcctctccagatctgacttgcccgtgtaccacaggtcagagcccatcacttcccaggcctcccagtgcttccctggacagattctgggatcatttactggtgactgccctgctagggtgtcagctgtcagatcctccccaacccccgagctcagctctggcctgaagtacttaccgtgggctcctgatggtcactgtctccagggccaaggtctagaaccttcacctgcctcaccaacaacattctcaggatcgattgccactggtctgccccagagctgggacagggctccagcccctggctcctcttcaccaggtgagcatggagggccatgcccacctggacagggatgagggtgagttccccaggattgaagcagctatgccaggacagtgtagcagccccgtggtgctgacaaatgccctttccagcaaccaggctcctggcggcacacataagtgcatcttgcggggcagtgagtgcaccgtcgtgctgccacctgaggcagtgctcgtgccatctgacaatttcaccatcactttccaccactgcatgtctgggagggagcaggtcagcctggtggacccggagtacctgccccggagacacggtgagcagcagctataggtctggggcggggccgcttggcaagaacatcctggctgcttgggggtttggagcagggccttgcagcctgtgagtggcccagtgagtgttctcagtcccagccgagtgagatccagggctgggggcaggcttggcccttgggaggggagggcccatatggttactgcaggggcagggttttggcaggaaataaacatgcacggctgctagttggggcaggggctggcacttgagtcatgtgaaatgcacttcagtcataccaggaaggactccaataagatgctgggaaaagcttccagcagcagactgtgaaggaaagggaaagcaagatttagaaaccacctagtctaggtgcagaggccagaggaagtcattgctgtcctgtcccgcctggggcttttgtggaccagtctcccagtgaggtgcctggtctgagagggccttgaccattccccttgggagtctttcagaccccagtcttgtgtgttctgactgacacacccagacccatggggcttcagcctcacatggattcactctgttccagttaagctggacccgccctctgacttgcagagcaacatcagttctggccactgcatcctgacctggagcatcagtcctgccttggagccaatgaccacacttctcagctatgagctggccttcaagaagcaggaagaggcctgggaggtaacactttggctggctttccctgggggcctctctcctgggaacagcagtccagggtagactccccactctacatagggagatgtcaacttgtagtgatgagaagggaggaactagagcggggtgtgtgtgcacacacacatgctggcatgcagatgtgtatgctttatgtgtgtgtatgggagtagggtgagtgcgcctgtgtctctgtgtgtgcacataagtgtggtgagtgtgcatgtatgtgtttatgtgtacacatatgtaactgtgcacactcatgtttgtgtgcccatgtttgtgtgtttatatgtaagtgtacatatgtgtgtgcctgtgccttgcatttgtgtgagtgtgcacatgggcatgcctatgtgtatgagtgtgtatgtgagtgtggtgagttgcttctgtgcacacacttttgtttatgagtgtgcatgcaagtgtgatgagtgtgaaagtgttcctgtagacatgtttgcctgtgtgtgcatatgtgtatttgtgggcaaacgcagctgtgtctgtgagtgtgagtgtgccttctgtgtgtgtgtgtgcacgtgaatgtggtgagtgtgtctgtgtgttaacacaagtgtgttcaagagtgtgttatatgagcatataatgcatgtgtgtattctcgagggctgagggacccagccccaccttcaccacctgctaactgtccccacccccacagcaggcccagcacagggatcacattgtcggggtgacctggcttatacttgaagcctttgagctggaccctggctttatccatgaggccaggctgcgtgtccagatggccacactggaggatgatgtggtagaggaggagcgttatacaggccagtggagtgagtggagccagcctgtgtgcttccaggctccccagagacaaggtgggcactgctgtggctgctgcacttccagcggagtctgggctgggcgtcttctcccctgttcacctcagccctgcaccctttcaccctcctgtaagcccctccccgaggcagccatgcctcagttgacccccttcctctgaaggtctgaggtctgtagggaggacagaaacacctgccaactctggggcttcctgggaacctgtagttagtggctgctgttaggagtgagggtggcagggctgcacaccagggctgggctcctgcctggaggctggacatgacctcagtgtccttaatgggggctggactgacccttgcgcactgcagtgctgagatggcccagggactttatgacccaccttgtggcagatgggaagagtgaggcccaggagtgtggttcacacaaggtccttcagcaggtgacacaaacctccaaggcccatcacaaggtccttcagcaggtgacacaaacctccaaggcccatcacaaaccttccactttggcccagggcactaaagggcgcacctttgccaggtgggtttggggggagcctcctggcactgaggctgctcacagccctgggcccttcctgtccacaggccctctgatcccaccctgggggtggccaggcaacacccttgttgctgtgtccatctttctcctgctgactggcccgacctacctcctgttcaagctgtcgcccaggtaggtggctgatgtgtgcgtgtgtgtacatgtgtgagcgggcaagagtgtgcatgttagtgtatgtgtgcagatgtgtgactgtgtgcatgtgtgagtgtgtggtgggtgggccatcaagggccgcccttgtctggttcctcccctcccctctccactgcctggtcctggacggggtgggcttttcgagtctccaccctggtccagaagagggttctcaagttgccaggggagagcagggaaggggggtctgaggcagaggctgaagataagggcagcttggtcccgaccagacccagagtcaccgagatcaagagccggaggtcctagtctcctgcctctggaggagcttggtttgttcatttgttcacatgttctacgaaaggacagttggggcatctggtgtgctcaggaccctgttctcagaacaagatggacaagggccctccttaaataaaccgtcacgcctcatgcaccacatgtcaggttacaagacagggtgcaggggccatgtcaggccgcagatgtgaggaagagggtgtggggagaggggtgttgggtggggctaagtgggagggtgcttcgcttctccttggagcaaaggaaagtgtaaaactgtgtgacacaacctagtttatgttttgaggaatagattgctgggacaaggggacatgggggacctgctggaggccaatgggggccagtgaggtgcccacagggagacgatttggcatgagccagtgaaagaagtggagatagagaaaagtggagagaattgcagggtctcatgaggggaaatagaagggacatgtgggtggatgagatatgagtggtgacccctgaggtggggaaatgggggacagccttgcagggaggttggtgaagtctatttggacctgttgggttggagccccaggtgacatccttgtgggagggtcagtggatccttggcagcaagtctggtgctcagggagacactgggtggggtgggagccacagaccttctgctgatggcaaagacagggttcctggagtgctggctccctctgtgatctgaggacccagctagtaactccccgttctgaacccgccatcgcagctcacgctgtaaaggacgcgcgcctcagtataaatcagttctatgcggccgttaggcaaggaggcccagttgggtcctgccctgagagtgggttggaatgtgatgagatgggagagaggcagtggcagggacgaggtgggcggacctcctgctgatggaaggaagctcagcctctgcagtgacctcaggccacctgggtcgccataggcctctgactggcctctcttggcctcagggtgaagagaatcttctaccagaacgtgccctctccagcgatgttcttccagcccctctacagtgtacacaatgggaacttccaggtgtgtgcagagaccacagaaggacatggggggcaggggttgcccagagctctggcctgcccaagatgttggctttcactgagggttggcggccagtatgggaggcttgtcagtgcttggagccttttttgtatattcagtgaatttcaatttatacgcgtatctcaaatggggaaaaattagctttattttccattgctgatttctttttgttctcaggtctctagttccattgttgattgaaaaaatgtaaatttctcataacttatctctgtcccctctggtttgcagctttctgcacccaccatgtgcctcacctcctccttctgcgaaggtgtctgtcctgtggccatggggaagggtctgtggtgtgtgtgctgcccttggggctctcactgcctctgggctcctgctctgcctggtcccctggtctccccggatcacatgatggcaccacagctgaggagtgggctctgcacttcccccccttccacccatgttgggctcctacagcccaggcaccagtgagcaacttgggggttgcatcagcccctcccctccctgctgggctgttggttcatgccccctgggtgggaggagggggagagggagagctccagtgagtggtctctggtttttcccctcagactcctcactttgggcaaaggacaagaggcagtgagggcccctccctggggtctgggccaagctgaccactcttctccagaatcttccctccctgtccccttcacactgtggctccagcttactatgcagaaaaatccttttctctctcaatgaggagcgtagttttcaagatttttgtccaaaaatataatttgaaccatgaaccgggcatctggctcttggcagagtctccctctttccccaaggtggtagatgtgactgtcaggagcctgggcagctgacgacaaggctgagcaggtcagattgtgactgtcccctggactgtcatcctgttgcgggcaccagctgttccctagagaactaggacacctgccacgggttatttagacctgcgggtgaggatctggtgccataggttggtctccagggagcactgcagtgatggagggtgttgtgtgtgtgatgcatgggatggaggctcctggtcccaccaagggaacagcttccttttggaggcgggggcctcctgtggccccacagaaggatccaggtctgctggccatagccgagtgctttgaaagtcaccagtcctgacagcgattcgtgtgtgtgtctgtgtgtgtgtgtgtgtgtgtttatgtgtctgtgtgtgttcgtgtgtgtgtctgtgtgtgtgtttgtgtgtgtatgtctgtgtgtgtgtgtttatgtgtgtgtgtctgtgtgtgtttaagtctgtgtgtgtttgtgtgtgtgtgtctctgtgtgtgtgtctgtatctgtgtgtgtttgtgtctgtgtgtgtttgtgtgtgtgtctgtgtgtgtttgtgtgtgtgtgtctgtgtgtgtgtttatgtgtctgtgtatgtttgtgtgtgtgtttgtgtgtgtgtgtttgtgtttatgtgtgtatgtctgtgtgtgtctgtgtgtctgtgtgtgtatgtgtctgtgtgtgtttatgtgtctgtgtgtgttcgtgtggtgtgtgtgtctgtgtgtgtgtgtttgtgtgtgtatgtctgtgtgtgtgtgtgtttatgtgtgtgtgtctgtgtgtgtttatgtctgtgtgtgtttgtgtgtgtgtgtctcgtgtgtgtgtgtctgtgtgtatctgtgtgtgtttgtgtgtgtgtgtgtctctgtgtgtgtgtgtgtttgtgtatgtttgtgtgtgtgtgtgtgtgtgttgggaatgcccagtctctgcagctgctgaaaggccctgaggcacatgctgtcaggagctggctctgtcctgggcagatatcaccatctgtacctcggttcaggctgccgtgggcaccaggccctgtgctgggggagtgctgaggagcctgaagggactcagggtcccgtgatgaggctgggctggcacatggaggaaagacagaatgtccaagacacaggcgctgcttggcctctgggtgtggacctcaggagggcttcctggaggaggagggatgctgggcttgccagaaaggaggcagctgctcccaggatgagttctgaacatgctacctgagcccttccctcctcccgtgctctgttccagacttggatgggggcccacggggccggtgtgctgttgagccaggactgtgctggcaccccacagggagccttggagccctgcgtccaggaggccactgcactgctcacttgtggcccagcgcgtccttggaaatctgtggccctggaggaggaacaggagggccctgggaccaggctcccggggaacctgagctcagaggatgtgctgccagcagggtgtacggagtggagggtacagacgcttgcctatctgccacaggaggactgggcccccacgtccctgactaggccggctcccccagactcagagggcagcaggagcagcagcagcagcagcagcagcaacaacaacaactactgtgccttgggctgctatgggggatggcacctctcagccctcccaggaaacacacagagctctgggcccatcccagccctggcctgtggcctttcttgtgaccatcagggcctggagacccagcaaggagttgcctgggtgctggctggtcactgccagaggcctgggctgcatgaggacctccagggcatgttgctcccttctgtcctcagcaaggctcggtcctggacattctaggtccctgactcgccagatgcatcatgtccattttgggaaaatggactgaagtttctggagcccttgtctgagactgaacctcctgagaaggggcccctagcagcggtcagaggtcctgtctggatggaggctggaggctcccccctcaacccctctgctcagtgcctgtggggagcagcctctaccctcagcatcctggccacaagttcttccttccattgtcccttttctttatccctgacctctctgagaagtggggtgtggtctctcagctgttctgccctcatacccttaaagggccagcctgggcccagtggacacaggtaaggcaccatgaccacctggtgtgacctctctgtgccttactgaggcacctttctagagattaaaaggggcttgatggctgttccaaagtgttgatggctgggagaaggggccagaggaggagtgaggggtggggtttgtccagccctgggctttccgggctctagagatagcatggtgtaggctcaatgacagttctggggacagcaagttggaggttcaggggcagcttcaggacagcaggatggaggctcagggacaattcctgggaggccagtgccctcgttcctccttgtcctcatcctcccccttgctccaggaaactgagagctgagcctggagcttccagacagtcagtgctgggggtgaccatccagcagtgatggtggcctgtgaagggtcctgcttctgtcctcagcctctcatggggtgggcttgtggaggagctgtggtctggagagagtggcagttggagcagaacgtgcctgcgtttgtttcctagggctgtcgtaacaaagtgccacaaaatggttagcttagaaccacagagatttgttgtctcacaattctgaagtccagaagttggaaataaagatgttggcagtgttcccaaccacatgttcttgggctcccatgaaacagaagttgatattaggccaaggaagcttcccagacaagactttattaagtcttatgccccgaaagtttgggcagaagagagacggtgcaggaggaagaattcttggctgactccccaaggggaatgcattgtggtgtcttaaggagggtgacatacataatttatgagctacatgagtgtcattgcacatatggggtggagcgaagggtgctcagacgcatgctaacacatacgttgcatgatcagaaaatggcagataagcccctccctgggtgaggactttagtattatcataagaccagggtcattctcctggccttgtgcacaagcaggtgatggagtcaactcccgtcagtaagacttatggcgggatgctgcttatcttagtttatttcagacagttggcaaggtctggccagcgagtatggcacctggagggtggtgctgcaaggtctagtggtcagcgggcacgtatggaacaatacgttagtgggggtgggccgagtcccatttatactctctcagcagggccatgctccctctgaaggcactagggaaggattagtttcaggcctctcttcagcttctgttagtttcttggcttgtgacaccaaagctgtaatctttcttttgttttgtttttgtgacggagttttgctcttgttgcccaggctggagtgcaatggcacaatctcggctcactgcaacctcctcctcccaggttcaagcaattcttctgcctcagcctttggagtagctgtgattacaggcacctgctaccacgcctggctagtttttgtatttttagtagagacggtgtttcgctatgttggccaggctggtctcaaactcctgatatcaagtgatccgtctgtctctgcctcccaaagtgttgggattacaggcatgagccaccgtgcctggccaaagttccagtctttacagggatttttccttgtgtgcatttctgtgtccaaatttcccctttttaaaatcacaataatagtgaattaaggctggccctaacgatttaatcttaacttgatcatctgcaaagacactgtttccatataaggtcacattcacagctactggggttaggacttcaacctagagggcctgacttctggcccaacacatcatggcccatcccagcatgccccatccccttcctgggtgccccaggcagatcacaggagggcctgactgctgggctttgggctgacattgggatcatctgcctagttagggctgtgaccagactgagataggaggtgggacctgactcctgaggcagggcttgaactctggaccagattacagactagctgaaacaggcaaaagcacccctccataagacacacccactggtgccaagtgagtttgccgttctcatggtaacagctggaaattactgcccctttccatggcaatgacctgaaagttaccaccccttttctagaaatttctaaataacctcctccttaatttgtatatagttacaagtgggtataaatatgtgtgcagaactgcctctgagctgctactctgggctgactgcctatggggcatccctgctccataaggagcagtacctctgctgccactgtgcacagctgcttaaataaaagttgctctctaataccaccgactcgcccttgaattctttcctgggtgaagccaaaagccctcctgtgctaaaccccaatttctgggctcacctttcctgcatcaagagtgttttggggctgggagcgctgaagttttgaaggcaggatgaaatggagactgttagctccctgggtcctgagctacagggagcaactctcctgggtgctctcatgcttcctgcaacctgagcagaaagaagtacctgtagcctgatgcccccaaaggcaaaagccccttctggctcagataggcagccctcccaccctgcatgcctgcagagcttctggggttttgtggggagcctcagcagagctggatcctggtctgtgggggcgaggcaggccccagaatgtatctttagcatccagagagtgggaggggtgtggacggaagcgaggtacaggcatcctcagctctaaccaagtataaaaatactagtgtgaatccacttcctggagctgggctctggggagccccgggctagtgtatttataacaggggctgtgtggctcatgaggctccatgtgtgacctgggctacctcatgatcacataaacgaacccacaattgggatgcctctcctgtgtggcctggacacctcttcattcaactcataaactttccctgagtgggccctggagagctggttctgggctggaacctgagagtgaagccactggaggctgtgtaatttgtaggtgagtcactcagtcacctaagcctggccctcccctctgcacagggtgctagccatacctagcagactgctgtgagttcacctgagcaagacacctgcacacagtggtgctcagaaaaagctaataattccttattggaatgagacaggcctggcatggtggctcatgcctgtaatcccagcactttgagaggctgaggcaagcagactgcttgagcccagaagtttgagaccagtctgggcaacatggcaaaaccctatcatctctatgaaaaatacaaaaataattagctgggcatggttgttcaggcctgtaatcccaggtactcgggaggctgaagtaggagaatcacttgaatccgggaggcagaggttgcagtgagccgagatcacgccactgcactccagcctgggcaacaaagtgagactccatgtcaaaaaaagaaaagaggccaggagcagtggcgcatgtctgtaatcccagcactttgggaggccgaggtgggtggaccacaaggtcaggagttcaataccagcctggccaagatggtgaaaccccgtctctactaaaaatataaaaaaaaaaaaaattagccaggcatggtggtaagtgactataatcccagctacttaggaggctgaggcagagaattgctcaaacccaggaggtggaggttgcggtgagccgagattgcgccactgcactccagcctgggagactgagcgagactccgtttcaaaaaaaaaaaaaaaaaaaaggaaaaaagaaagaaaagaccccaggaccatacatatttacagctcagtattaactaaccttaatgaaatatgattttatttaaaatggtcaaggtaaaggaaaaaaaagagtagtgactttcttcaagtaattttatggtataatatcaaagcttgatatagttaatacatttcatctaatataggaatgagaatgcttataaagcagacgtcattttatgtaccattacaaatacactgccaattaaacagactttctcaacaaaagactgttgttgacgaggtgacttccattagacacacaaaatggtttgtttttgttttcatttgtttttgttttttgagacaaggtctcgctctgtcgcccaggctaaatgcagtggcctgagaatgataatgtgcctgcttttccatttcctgtgttgtttccactgcgttaacaaaagagccttaaaacacaaagcactggccgggcccagtgggtcacgcctgtaattccagcactttgggaggccgaggtgggtggatcacctgagatcaggagttcgagaccagcctgatcaacatggagaaacaccgtctctactaaaactacaaaattagccgggcgtgatggcgcatgactgtaaccccagctactcgggaggctgaggcaggagaatcgcttgaacccgggaggcagaggttgcagtgagtcgagatcgcgacatcgcactccagcctggggagcaagagcgaaactccttctcaaaagaaaacaaaacaaaacaaacaccgagcactcatctaggggcgcctgtttcattggccttagactgcggtgcctgctggtccccgacctcacgagggcatctctgtgttcctcctcctttccccgtaccagggtcagccccaggtgtcccggagatgcagccccaggtgtcccagagatgtcctcatcgcggacgtggccccaggtctcctcaggtgtctcgaagccatggcccctcctgggtgggtcctgaggagagaaaactccgtcctcacagtcctcacacccagggatgccgctgtacggatcagacgcagttctactgtggcgctccgggtttggccgggccccctaatggcagccgtggagaatccctgaaaattagcgtttggatttttccatgccgtgattttggaaatttcaactgacatggagcccaccatcccgtgccccgaccgaaacccatggagacagcaagcaaagaagatggccagttcacgcctgtaatcccagcactttaggaggccgaggcaggaggatcacttgagctcagtgagttcgagaccaacctggccaacatggtgaagcccccgtctctactaaaaatacaaaaaaaaaaaaaaaaaaaaaaattagctgggcgccgtgggcaacaactgtatgtagtcccagctacttgggaggctgagggaggagaatcgcttgagcccaggaagcggaggttgcagtgagcagagattgcacacctgcactccatcctagtcaacagagtggggcttcctctcaaaaagaaagagggcagggcatggtggctcacacctgtaatcccagcactttgggaggccgaggcgggcagatcacgaggtcaggagattgagatcatcctggtcaacgtggtgaaaccccgtctctacaaaacatataaaaattagctggacatggtggcctgctcctgtagtgccagctttgggaggctgaggtaggagaatcgcttgaaccatggaggcagaggttgcagtcagcggagattgcgccactgcactccagcctgggtgacagagcgagacgccgtctccaaaaaaaaaaaaaaaaaaaaaaaaaacaaaaagcaaaaaacaaaatcaaaaacaaacatccagcactgatcccaggggcctgtttcctcggcctcaggctgatctcccgacagcgtctccgcgttcttcctcctctcccggtaccagggtctcttcccagaaagaaactcacatccgtaacctgcatcttggcctgaactgggggtgacccgcccaagcctccatgaaggggaatctcctacaaagtgaggtcctgctacaaagtgcacgacgggaaatgcagccgcgctcgctccgccacactcacaccgggggcgggaagccttttcctcaccttggcctcggccccaagtggtgtcccggagatgcagcagcgtctcccagtcctcaccgcggacgccgccccaggtgtccccaggtgtccccaggtgtctcgaagccgcggtctctcccatgcgggtcctggggagaggaagctcagtcctcatagtggccgcaaagtgactgccgctgtgtggatgagacgcggtgcgtgcacggcgccccgagttgccaggggccatgcgcccccttgcggcagccatggggagtctctgaaaatcagcgtctagatttttccaggctgtggattttggaaattacgactgaaatggagcccaccatcccatgccttgatcggaactcatggagcaaggaagcaaagaagatggccagttcatgcctgtaatcccagcattttgggaggctgaggcgggcggattacttcaggtccagagtttgagaccagcctggctaacatggtgaaaccgcatctatactaaaaatacaaaaattagctgggcatggcggcacgtgcctgtaatcccagctactcaggaggctgaggcaggaggattgctcgaacccaggaggcgcaggttgcagtgagccaagatcatgtcactgcactccaacctgggtgacagagccaaactccatctcaaaaaaaagatggccagtaggcaaaacttaattgattttctttcttttctctttaagagacagggtctcgctctgtcacccatgctgaagtgcagtggtgtaatcacagctcccgagttcagcctccagctcccgggttcaagaaattctccagcctcagcctcccaacacactgggattacaggtgtgaacaactgtgtccggcaccacctgattttcctttatttattattttattttttatgggcggggcaggtctaactatgttgcccaggctggtctagaactcccaagctcaaatgatcctcccaactaggcctcccaaagtgctaggattacgggcgttagccaccacacactgcctgattttctttctatcatcagcaataatgtataggaataatttgaacttgaaatttgaaaaaaataccatttacaatagcattcccaaatttaatttattaggtataaatctaacaaaatacatacaaatatgcattcagaaaactttagatcacggttgagaagaatcaaaaatattaaatcaaatgcagatactccttgtttaggagcagtacactcattattgttagctttaccacaaagctaaagcaatgaagagagtgatattggtgaaggaatggacaaacagctcaacagaacacaatacagaacccaaaaaacccgagtaaatacattcaattgattttgtcaaaggggcaaaagcaattcactggggaaagaaaagtctgttccacaaatggcaatagacaatcggaaaccatacggaaaacactgaatgtggacaaaaacttcatagctcacccccaaaaaatcactcaagatagtctgtagccttaaatgatcaaatataaaattgtaaaagttttatagaagaaaatccacgtgactttgggttggtgatgagttcttagatacaataccaaaagccagtccataaaagaaaaaaaatgataatttggacatcattaaaatttaaaatgactactctgtgaaatatcctgttaagagaatcaaaaaataaggcacacactgagagaaaatatttataaaacaagcctgaaaaaaagacttgcatgcaaaatatacaaagacattctaatactcaacaagaagaaaaacaacccaattaaaagataaagacatggaataggaacagctccagtctacagctcccagcctgagtgacgcagaagatgggtgatttctgcatttccaactgtggtactgggttcatctcactggggcttgtcagacagtgggtgcagcccacaagcttgagccgaagcagggcgagacatcgccttcacccgggaagcacaaggggtcagggaattcccttttcctagccaagggaagctgtgacagatggcacctggaaaatagggtcactcccaccctaatactggcgcttttccaacggtcttagcaaaccgcacaccaggagattatatcccacgcctgggctcggagggtcccacacccacggagcctcgctcattgctagcacagcagtctgagattgaactgcaaggtggcagcaaggctggtggaggggtgcccgccattgctgaggcttgagtaggtaaacaaagtggctgggaagcttgaactgggtggaacccaccacagctcaaggaggcctgcctgcctctgtcagactccacttctggggccagggcatagtcgaacaaaaggcaacggaaatctctgcagacttaaatgtccctgtctgacagctttgaagagagtagtggttctccaagcacggagtttgagatctgagaacagacaaactgcctcctcaagtgggtccctgacccccgggtagcctatctgggaggtaccccccagtaggggcagactgacacctcacattgccgggtacccctctgagaccaagcttccagaggaacgatcgggcagcaacatttggtgttcagcaatattcactcttctgcagcctccactgctgatacccaggcaaacagggtctggagtggacctccagcaaactccaacagacctgcagctgagggtcctgactgttagaaggaaaactaacaaacagaaaggacatccacacaaaaaccccatctgtacgtcaccatcatcagagaccaaaggtagataaaaccacaaagatagggaaaaaacagagcagaaaaactgaaaattctaaaaatcagagcgcctctcttcctccaaaggaacaaagctcctcaccaacaatggaacaaaggtggacggagaatgactttgacgagttgagaaaagaaggcttcagatgatcaaacttctccgagctaaaggacgaagttcgaacccagtgcaaagaagttaaagaccttgaaaaaaagattagatgaatggctaactagaataaccaatgcagagaagtcctgatggaggtgaaaaccatggcacgagaactatgtgacgaatgcacaagctttagtagccgatgcgatcaactggaagaaagggtatcagtgattgaagatcaaatgaatgaaatcggggtcagggtcaagggtcagggtcagggtcagggtcaagggtcagggtcaggggtcagggtcagggtgagggtcagggtcagggtcagggtgagggtcagggtcagagtcagggtcagggtgagggtcagggtcagggtcagggtgagggtcagggtagggtgagggtcagggtgagggtgagggtcagggtgagggtcggggttagggttcagggtcggggttagggttcagggtccgggttagggttcagggtccgggtcagggttagggtcagggtcagggttagggtcagggtcagggttagggtcagggttttagggtcagggttttagggtcagggtcagggtgagggtcagggtcagggtgaggaccctttacagcagatgaaggcctctccccagccagaaaagatggagcacacgctgggtggtggccccgcttcctcactggaaggagatggtgctcttcttttttctttctgaattgtggccaccttcataccagtctgtcatggaacacttaagccgcttgagtgcctgctggtactcccagccctgccatgcctgagccccctgcacacaaggagccaggagtaatcagggcagacccattagggcacggggacttctggattgtgaaattggctctctgggggccaaggccttctaacgttggtggaagtggctttggcttattgggtcggattctaggccattcgttccaacctttagagacatcccagctttccctagcccagagtctgcagcccctccaccatcccacatcctccccctccctttcctcatgaaccccagtcgcgcctctgccttctcaaacccctccaccatcccacaccctcctcctgcccttcctcatgaaccccagtcacgcctctgccttctcatccctgcgcgccacacaggctcgctcgtgcccggtgaatgctgaggctgctctgcacgtggagtgtggccctgtgggcaagggctgggctcttggaggtaggggagctacaggggcgactgggaggaggatgttgtgttacacacgcatcagagttaactttgcagtgagagcagccttgctgcggccaaagaacatggaaaagcatgagtggggtgatgtgccttaaagcatcagacacttgggcctcgggcatcaggagccagccacagggatgtctggggaaatggcgttccatgagatgcaagcacacaagaatgcacttggcacatctggggaacagcaggcagctgatatcactgggcccaccccgcaccagggaggatggaagcaggtgaggagctagaccacactgaggcggtggtcgggactcagagtttgctcagtgagccgttcactaggtgcaggggcagttccccgtctgaatttaggtgacgacactcaggtccagccttgccagtctcagcctccggtctccgttccccctctgcagaggtcactttgtctgctgcacgtgattatgaggggttgtgaagtgcttgccccatcagtagccagtgtgcatgtgtaaataccatcctctgtgtgccctggaggctgtccttcagatagcatgtacaggtggcagcatagggcctgtccctagtgagagtgcagggaactcagcaccgtcaactcctcgaccctgcaggtcagattatccttgtagaggccccctggatggcaccaagatcggccctggcaagcaggtgaccctgacttcagagcccttgcctgagggcctggcctggcagctctgctgttagaagcaggaggtgtgcagggggtggggagcagcccagcctctgtgatcttctccatggcaggatctcccagcaggtagagcagagccggagccaggtgcaggccattggagagaaggtctccttggcccaggccaagattgagaagatcaagggcagcaagaaggccatcaaggtagtccccatacccctgtgtcctgaggctactgggcagtccctccatttccccatgcctctgaggccgcccattctctgccctgctgcccacctgtaccttgggctttcttctcgcccaggcttccaactccaccctctcctgccaagcaatcctagccctctgagcctcttagggccccctcagacttgtccctgtgtccacaggtgttctccagtgccaagtaccctgctccagagcgcctgcaggaatatggctccatcttcacgggcgcccaggaccctggcctgcagagacgcccccgccacaggatccagagcaagcaccgccccctggacgagcgggccctgcaggtctgctggctgcgcacataacttagcctgtcacacaccaggaggactggatactggggaggagccggggccaccatagggttctgtcccccagaggaggctgactgggatggggtggcagctgattaggcccagcaccaaatattcaccatcccttggccatcctggccctctcaggagaagctgaaggactttcctgtgtgcgtgagcaccaagccggagcccgaggacgatgcagaagagggacttgggggtcttcccagcaacatcagctctgtcagctccttgctgcttttcaacaccaccgagaacctgtatggccagaaggcagggccgaggggtgtgggcgggaggcccggcctggcttagtggggacccagggcatcagacacaggtacagcacataggccaggagccagggggtgactggggtggctcggctcgggaggcctgggaccccacagtgcacgctgtgcccctgatgatgtgggagaggaacatgggctcaggacagcgggtgtcagcttgcctgacccccatgtcgcctccgtaggtacaagaagtatgtcttcctggaccccctggctggtgctgtaacaaagacccatgtgatgctgggggcagagacagaggagaagctgtttgatgcccccttgtccatcagcaagagagagcagctggaacagcaggtgggaggggtgggacagaggtggagacaggtgcagtggcccagggccttgccagagctcttctccagtcaaggctgttgggccccttattccacccatgggaggtgcacacaaggtcttgttggctgcccctgcaggtccctgtcacctctcacatgtccctgcctaatcttgcaggtcccagagaactacttctatgtgccagacctgggccaggtgcctgagattgatgttccatcctacctgcctgacctgcccagcattgccaacgacctcatgtacagtgccgacctgggccccggcattgccccctctgcccctggcaccattccggaactgcccaccttccacactgaggtagccgagcctctcaaggcaggtgagctgggttctgggatgggagctgggccggggacctccctgctgacacaccttcttccctagacaccccgcactttgtgtttcagacctacaagatggggtactaacaccacccccaccgcccccaccaccacccccagctcctgaggtgctggccagtgcacccccactcccaccctcaaccgcggcccctgtaggccaaggcgccaggcaggacgacggcagcagcagcgcgtctccttcaggtgggagcagctctttgaggccacctgatttctggcgtgctcagtgcactcgggtggattttctgtgggtttgttaagtggtcagaaattctcaattttttgaatagtttccatttcaaatatcttgttctacttggtccataaaatagtggctttcaaactgtagagctctggacttctcacttctagggcagagggaacctgaacaagtgaggctctgggttccccattcctaattaaaccaatggaaagaaggggtctaataacaaactacagcaacacatttttcatttcagcttcactgctgtatctcccagtgtaaccctagcatccagaagtggcacaaaacccctctgctggctcatgtgtgcaactgagactgtcagagcatggctagctcaggggtccagctctgcagggtgggggctagagaggaagcagggagtatctgcacacaggatgcccgcgctcaggtggttgcagaagtcagtgcccaggcccccccacacagtctccaaaggtccggcctccccagcgcggggctcctcgtttgaggggaggtgacttccctcccagcaggctcttggacacagtaagcttccccagccctgcctgagcagcctttcctccttgccctgttccccacctcccggctccagtccagggagctcccagggaagtggtcgacccctccggtggctgggccactctgctagagtccatccgccaagctgggggcatcggcaaggccaagctgcgcagcatgaaggagcgaaagctggagaagaagaagcagaaggagcaggagcaaggtgagcgggccctggagcctgcggtcggagggccttgggcaagatcgcctcctcccctccagccctgagtccactgggtgctttctgcccaccccctgctcttgccagctggcccctgcttcccctagggcacatgctggaagccctgggccgccaccagaagtcctcagccctcctgcctgggctatggctccttcctggtttgggagccatagtgaagctttcctctctaagctcacccagcccaaactgtgacaggagaatcttcttcgactgccaagagcggtccaaggcaatggtcagccactgcagccccctgagatatttttagagactggacctgaggcctctggaggctactgatgatgcctgctgtgaacgcagacactggtgtgatgcgatgcctgcgcctgcagcggcagtgccctgggcactatggttttgagcttgtacccagcgctgcttttgccttgctctgtgaccccaggcaagctgcctcacctctctgggccagtttccccatcgtacagtggtgctgcacaccctggccctggccccgaggtggctgggaggtggctcctcaaacagccgctttctcatcagtgcccggtgctgggtcagggatcgactgaggctctgagctaactaggaaacacagtggccttggagggctggggagtgtcatgggggtggggacagggagccaccggtcgcatgtgactgaactcttcaccccagtctgtggctttcccgttgcagtgagagccacgagccaaggtgggcacttgatgtcggatctcttcaacaagctggtcatgaggcgcaagggtaggaggcagggccgctgcccgccctgggtcggcaccttgtaattctgtcctgcctttttcttcctgtatttaagtctccgggggctgggggaatcagggtttcccaccaaccaccctcactcagccttttccctccaggcatctctgggaaaggacctggggctggtgaggggcccggaggagcctttgcccgcgtgtcagactccatccctcctgtgcccccaccgcaacagccacaggcagaggaggacgaggacgactgggaatcctagggggctccatgacaccttcccccccagacccagacttgggctgttgctctgacatggacacagccaggacaagctgctcagacctgcttccctgggagggggtgacggaaccagcactgtgtggagaccagcttcaaggagcggaaggctggcttgaggccacacagctggggcggggacttctgtctgcctgtgctccatggggggacggctccacccagcctgcgccactgtgttcttaagaggcttccagagaaaacggcacaccaatcaataaagaactgagcagaaaccaacagtgtgcttttaataaaggacctctagctgtgcaggatgcaaacgtctcggggtcagtgactgcctcctgcccctgttggtccctaggcagtgggggcagaagctcccagctgacctgtttctctgggagagaagggcagtcagcaggggcagctgttgcagatgggaggaatagtctcccacaaaaaaggtttcagtgacagacacggggtctctaaaaatagtcatgctgagagcccaatggcccttggcacaattgctggtgttggggtagaagatgtcttggagtttgctcaagtggttgagagggagggaggtgccatcaacttggaggaactggcaccaagccagggagatagaaatccaggcaaggctgtggggcaggttagggagcaaggctgcaggggtgactcaggaagaaggtgggggaggtgacaagcccccaggcaggggccctgtggccatggggatctttttaaattgagactagggggtgaatagtccagggcagctaactttagttattatagaaagggcagtagcagatgggtctgctccgtctcgcttctaagaaggtgggcaggacaaatggcagcctcctgcagaggcccagtgagaagcctggccctcggccacacaggatggaagacagattggattccacagaggggagctgccctgggaagatctcacggatggccaggacccaccatttcttcggggttcccctgttttctccaacgggcactaatgcctgtgcctgggtcctggcaacactctggactccacactcttctgggtttcacctttgtagcaggatccctgcagatcaggcccatgacaaacaccgtctccagcgggcagagcaaaggaagggcgcagcgccaggcagtggtgcagctgcctgtcaggaagaggcctacttctggtgaaactgggcagacaaaaggcagtgagaaatgtgatctcggggtggtggaggctctagggaaaggaaaaggcaggagtgaacttccacacagcagcaatggcagaaccaaaggtggctttgacctccacgagggctcagatccaggccaacagcttgtccaggacagggtgccgggtgtatcactaatccaggagcactatgctggcagaatccctttggtgcctgatggccctgccttcgtgggaacagaggctaaggctttgagttacagctgcctccccaacagtgcatccccttctccttcctcagcctcaggtaggagacagggcaggcaacccccctttcctcttctccccttctccagcccctgtctgtccacccagctggaggcagccaggcttgcctatggactggttgacagccttcatgcacaggttctccaccagagcctttcttgggggcccctggctgggctctgagctgggagtgaaggggatgacccatgcggactgtttgctgcttgtagctttccctgggaaagactctgccaggccttggagccagaccaggaggctttataggccactgcaagcagcagggctccagatgacatcacagggaatatcaagagggtgtggaggggcatcgaagcctctccaggagacaggagacgccggcccagtagagccctaggggcgacgccactcccactcactgtctactctcctctcacctctgcaacactggggacactcacaagattgtgatccaagtcggccgtcgtcttctgcagctctggagacctgatgctggggaagggcatgcctggcatcaccacacacctgggaggagacaggagcctggggccggtgggcccacacatcaccagctgctccgttctaccatttcttcagccctcttggctgtgcctgcggctctgcccctcccctctctgcacctaccacccagagagggcttgttgagctcagagatcccacctaggccaatccactgggttctgtggcagcgatggcctgcctgatcttccacctgctctcccagggccaaagccagacctgctgagcccctccctccagccggctggtctgagcagtcacagcccggctttgggctccgatggcagcagatggcaggtaggggtccagctgctggagcgagggccggccacgtatcacagccaaggagatgagcacaagcactacttactggcctaggttgtcagagaagttgatgctctcactcatctttcctccaatctttcccctatgcctggttgtggtattaagttacatgcagacaacaggggccagaagatgaacaatggcccatcccactctaggcatggctcctctccacaggaaaactccactccagtgctcagcttgcaccctggcacaggccagcagttgctggaagtcagacacctgcagatcaagaccacagcatcaagaccctgtgacctctcaaaggcctggtggaaaggacacgggaagtctgggctaagagacagcaaatacacatgaacagaaagaagaggtcaaagaaaaggctgacggcaagttaacaaaaagaaaaatggtgaatgatacccggtgctggcaatctcgtttaaactacatgcaggaacagcaaaggaaatccggcaaatttgcgcagtcattctcaacaccggccatgcagcaaaatcatcagtggaaatttaaaaaaatacacgtggccaggccccagcccaaatcactaataagaatctccagggcttcacctgttagactggcaaaaaatccaaaagtaaacactttgtggagaaacaggcactcctagacattgctggtgggatacagaacagtacaattctgatggtaatcagttaacaaattaaacatatttattttatacttttaaacccaggaatcccatatttaggagtctactgagaccaaacagcatatgctcctggtgtttccctataatccgccactactgttggagcaagagggcccagcagtgtccccagctgccagcaggcgggcgtgctgccagtacaccttgagcaagaggaccctgcaatgtccgtagctgccagcaggcggcgtgccaccactatacagtaagcaagaggaccctgcagtgccccggcgccacgagggggcggtggccaccactctaagcaagagagccctgcagttgccctagtcgccagcagggggcgccctggcacagcaccgtgagcaagcgggtcctgtagtgcccggctgcaagcaaggggcggtcgatcccggcttttcggattactgaagttccacccgtctctgcgccgcgccgccgtgacgtgagtttctgcgcgtgcacggcgcccccgcacccccccgcccccagcccggcgccgtgcgactttgctcctgcaacacacgcacccccaacccccgcccgtaggcgtgcgtctctgcgcctgcgccacgcctccacccctggacgcgctagcatgtgtctctgcgcctgcgccggcgcggcgcgcctctctgcgcctgcgccggcgcggcgcgcctctctgcgcctgcgccggcgcggcgcgcctctctgcgcctgcgccggcgcggcgcgcctctctgcgcctgcgccggcgcggcgcgcctctctgcgcctgcgccggcgcggcgcgcctctctgcgcctgcgccggcgcggcgcgcctctctgcgcctgcgccggcgcggcgcgcctctctgcgcctgcgccggcgcggcgcgcctttgcgacggccgagttgcgttctcgtcagcacagagcggcagagcaccgcgagggcggagctgcgttgtcctctgcacagatttcggtggtactgcgaaggcggagcagagttctcctcaggtcagacccgggcgggcgggctgagggtaccgcgagggcggagctgcgttctgctcagtacagacctgggggtcaccgtaaaggtggagcagcattcccctaagcacagacgttggggccactgactggctttgggacaactcggggcgcatcaacggtgaataaaaatgtttcccggttgcagccatgaataatcaaggtgagagaccagttagagcggttcagtgcggaaaacgggaaagcaaaagcccctctgaatgctgcgcaccgagattctcccaaggcaaggggaggggctgcattgcagggtccacttgcagcgtcggaacgcaaatgcagcattcctaatgcacacatgatacccaaaatataacacccacattcctcatgtgcttagggtgagggtgagggttggggttggggttgcggttggggttggggttggggttggggttggggttagggtttgggtttagggttggggtaggggtaggggtggggttggggttggggttggggttggggttaggggttggggttggggttggggttggggttggggttagggttaagggttagggttaggggttaggggttagggttggggttggggttagggttagggtagggttagggttagggttaggggttaggggttagggtagggttagggtgagggtgagggtgagggtgagggtgagggtgagggttagggttagggttagggttagggttaggggttaggggttagggttagggttaggggttaggggttagggttagggttaggggttagggttagggttaggggttaggggttaggggttaggggttagggtagggtagggtagggtagggagggttagggttagggttagggttagggttagggttagggttagggttagggttagggttagggttagggttagggttagggttagggttagggttagggttagggttagggttagggttagggttagggttagggttagggttagggttagggttagggttagggttagggttagggttagggttagggttagggttagggttagggttagggttagggttagggttagggttagggttagggttagggttagggttagggtgagggttagggttagggttagggttagggttagggttagggttagggttagggttagggttagggttagggttagggttagggttagggttagggttagggttagggttagggttagggttaggggttaggggttaggggttaggggttaggggttaggggttagggttagggttagggttagggtgtggtgtgtgggtgtgtgtgggtgtggtgtgtgtgggtgtggtgtgtgggtgtgggtgtgggtgtgggtgtgtgggtgtggtgtgtgggtgtggt

SEQ ID NO: 731 - DNA, 1668 bp, Homo sapiens
aagcttttccctgacacccctctcgcccttgatgccaacaaaaagaagagagccccagtacccgtcagagggggaccgaaatttgctgctaagccacataaccctggcttcggcatgggaggccccatgcacaacgaagtgcccccaccccccaaccttcgagggcggggaagaggcgggagcatccggggacgagggcgcgggcgaggatttggtggcgccaaccatggaggctacatgaatgccggtgctgggtatggaagctatgggtacggaggcaactctgcgacagcaggctacagtgactttttcacagactgctacggctatcatgattttgggtcttcctagagcgtctaaaagtattgcacacaaaatcaactttttactccaatttcctccaactccaaaacccaaagtgtccgtgctgtgtccctgtgcttcactgggtttctcaaccgtggcttttcaccgcagcttgtctgaaactcttagcctgcagaatttaagacaatggcagtttttatcgtgatttgcctttgaacttggtcctattgaagttcacaataagtggaaaacaattttttcagagaatgtatttttgtgcagaattgcacagaattctagagacagcgttgttcggcatcaaggcaaaagcccacctttgctttttatggaaagcattactttatttaaagagacagacaatgacgcattttaatctacctttgtcttaatttacagcaggttttgtatgaatttttaaccttttaacaaactcccaaatctggttgatgcctttgacagtgatgaaaacgatttcaccacatctgaatccagagaaaccggctttttttcttattgcgagcatgttaaaacgttgggaacatgtggggaattgtatattgcgctgaattaacttctcccgcctcttgtaatgctctggtgggttcttgtttgggaatgcgatattttgtggctggtttagctagagagtgaactctcaaaggtatcaaaactgtgcttccattattagtgcaagaaacagacaggctttaaggggtagatgacgtgaaattttgcaagtcttaattacagctgcagatgcatgggattctggatttttttgttgctttttagtttaatgggactttaaaagtaattgaggagaaagaaccgtgatgttccctgtttctccagtaaaggactggcttttgcttgggcagaggtggtgctgctgggtgtgcagctgccacagactccaaaggcgtagaagtttgtgccaacacacggagtcattctggctctctgctgaggcccctgttttctggcaggtgccctccttggaaactggttttggctctgatcagcggttctttttgcagcaaagcctgcatctgtgttgacttgcaagattttgcgtttattcaggcaaaaactggtcaaaatggttactacatgatttgttcccagaggtttgaaacattcagtgaaactttttaaaactttgattgcatgatgtattttttttttagaaagttattgtttgagaataatgtctttttataccaggaaaatagttatcctgaatgacgttgaaaactccccctcccctttatttttttttaatcaatacatgtgaaagtaacaaaaaaaaaaaaaaaaaaa

SEQ ID NO: 732 - DNA, 3388 bp, Homo sapiens
agcagacagcaactttagcaggtgatttcaatcaagtcagctgaaatgcactcacttccaggagttgtagctgtagggtacatcaatgaagctattgatgaagggaatcctttgaggactttagaaactttgctcctacctactgcgaatattagtgatgtggacccagcccatgcccagcactaccaggatgttttataccatgctaaatcacagaaactcggagactctgagagtgtttccaaagtgctttggctggatgagatacagcaagctgtcgatgaggccaacgtggacgaggacagagcaaaacaatgggttactctggtggttgatgttaatcagtgtttggaaggaaaaaaatcaagtgatattttgtctgtattgaagtcttccacttctaatgcaaatgacataatcccggagtgtgctgacaaatactatgatgcccttgtgaaggcaaaagagctcaaatctgaaagagtgtctagtgatggttcatggctcaaactcaacctgcacaaaaaatatgactactattacaacactgattcaaaagagagttcctgggtcacacctgaatcatgcttctataaagaatcatggctcacaggaaaagaaatcgaggctttttggaaaggatataaacaacggaaggagtatatgcacaggcggcaaacgttcattgataatactgattctgttgtgaagattcagtcctggttccgaatggcaactgcaagaaagagctatctttcaagactacagtatttcagagatcataataatgaaattgtgaaaatacagtcactgttgagagcgaacaaagctagagatgactacaaaacattggttggctctgaaaacccaccattaacagtaattcgcaaatttgtatacctgctggaccaaagtgatttggatttccaggaggaactagaggttgcacgattaagggaagaagtagtgaccaagatcagggccaatcaacagctggaaaaagacctgaacctgatggacatcaagattggactgctggtgaagaacaggatcacactagaggatgtaatttcacacagtaaaaagctgaacaagaaaaaaggaggagaaatggaaatactgaataacaccgacaaccaaggaataaaaagtttgagtaaggagaggagaaaaacactagaaacatatcagcagctgttttaccttttacagaccaaccctttatacttggctaagctgattttccagatgccacagaacaagtccactaaatttatggatactgttattttcacactatataattatgcctctaatcagcgagaagaatatctacttctcaagctttttaaaactgctctggaggaagaaataaaatcaaaagtggaccaggtacaggacatagttactggtaaccctacagtcatcaagatggtcgtcagcttcaatagaggtgcccggggacagaacaccctgcgccaactcctggctccagtggtaaaagagatcatcgacgacaagtcgctgattatcaacacaaaccctgtagaggtgtacaaggcttgggtgaaccaactagaaacacagactggagaggccagcaagttgccttatgatgtgaccacagaacaagctctaacatacccagaagtgaaaaataaactggaggcttccattgagaacctgagaagggtcaccgacaaagtcctgaattctatcatttcttcccttgatctactgccttatggattgaggtatatagccaaagtactgaagaattcgatccatgagaaattccccgatgcaacagaagatgagctattaaagattgttggaaacctcctgtactatcggtacatgaatccagccattgtagctccagatggctttgatatcatcgacatgacagctggaggtcagataaattctgaccaaaggagaaacttaggatcagtggccaaggttcttcagcacgcagcctccaacaagctgtttgaaggagaaaatgagcatctctcatctatgaacaattatttatcagagacgtatcaggaattcaggaaatatttcaaagaagcatgtaatgtccctgagccagaagagaagtttaatatggacaaatacacagacctggtgacagtcagcaaaccagtcatttatatttcaattgaagaaatcatcagcacacactcactcctgttggaacaccaggatgcaattgcccctgagaaaaatgacttactgagtgaattgctggggtcgctgggagaggtgccaaccgtggaatcttttcttggggaaggagcagttgaccccaatgaccctaacaaggcaaatacactaagtcagctttcaaagaccgagatttctcttgtcttgacaagcaaatatgacatagaggacggtgaagctatagatagccgaagcctcatgataaagaccaagaagctgataattgatgtgatccggaaccagccagggaacacattgacagaaatcttagagacaccagcaactgcgcaacaggaggtagaccatgccacggacatggtgagccgtgcaatgatagattccaggactccagaagaaatgaagcatagccaatctatgattgaagatgcacagctgcctcttgagcagaagaagaggaaaatccagaggaatcttcggacgttggaacagactggacacgtgtcatccgaaaataaataccaagacattctcaatgagattgccaaggatattcgaaatcaaagaatctatcgtaagcttcgaaaagctgaattggcaaaacttcagcagaccctgaatgcacttaacaagaaggcagcattttatgaagagcaaatcaattattatgacacctacataaagacttgtttagacaacttaaaaagaaaaaatactcggagatcaattaaactagatggaaaaggagaacccaaaggggcgaagagagcgaagccagtgaagtacactgcagcaaagctgcatgagaaaggtgtcctgctagatatagatgatcttcaaacaaaccagtttaagaatgttacatttgatatcatagctactgaagatgtaggcattttcgatgtaagatcaaaattccttggtgttgagatggaaaaggtgcaactcaatattcaggatttacttcagatgcaatatgaaggagtagctgtaatgaaaatgtttgataaggttaaagtgaatgtaaaccttctcatatacctgctgaacaagaagttctatggaaagtgaagtgcctacagaaatttcttggattctgtatcatctggattaggaaatgaatttgtttaatatttttgtttttaaacatgattgaaatcacaaaaaaaaaaaaaaaaaaaaaaaaaaaaaaaaaaaa

SEQ ID NO: 733 - DNA, 5814 bp, Homo sapiens
gagggcggggaagaggcgtgacggagattcctgaggtgtagtagcctgaggttcccttatgtggccctatagctgttactgaaggaagtagcctacgtccacgcctacaactgaagtctcttgacaaacacctcacccctgcctccgggatgaaagggggtaacctagacctgaatgggcttgaccatctcacaactgctcgcgtgacgaccgcattcgtggcaggtaagaagattgctgtatcaactcaagaaagcagtaacttcactgtctttgtattttgaattgcaacaacaactttgatatcaacaatgaagcaatgatatctaagaacaaaagagtatttgccaacagtcatcataatatcaagtgattgtataagcagaaacaagctgtcacagacctgtgcgtcagctaatatatggagaatgctttcttctgatactatttacttagaggcagttttaatataaatcatttcaattatatctacatcaaataaaataaaaatgagtgaagcccccagattcttcgttggaccagaagatacagaaataaatcctggaaattatcgacatttcttccaccatgcagatgaagacgatgaggaggaagatgattctccaccagaaaggcagattgtggttggaatatgttccatggcaaagaaatccaaatccaaaccaatgaaggaaattcttgaacggatctccttatttaaatatatcacagtagtagtatttgaagaggaggttattttgaatgaaccagtggaaaactggcctttatgtgattgtcttatttctttccattctaaaggatttccactggacaaagcggttgcctatgcaaaactcaggaatccatttgtaatcaatgacttgaatatgcagtatctcatacaagataggagagaagtatatagtattcttcaagctgaaggtattttacttcctcgttatgctattttgaaccgtgacccaaataatcccaaagaatgtaatctgattgaaggggaagatcatgtagaagtaaatggggaagtttttcaaaagccatttgtagaaaagccagtcagtgcagaagatcacaatgtttacatttattacccaacttctgctggtggtggaagtcaaagactctttagaaagattggcagtagaagtagtgtttattctccagaaagcaatgtacgaaaaacaggctcatatatatatgaagagtttatgcccacagatggtactgatgttaaggtttatacagtgggtccagattatgcccatgctgaagctcgaaaatctccagcacttgatggcaaggtggaacgagacagtgaaggaaaagaagtaagataccctgttattctcaatgcacgagagaaattaattgcttggaaagtctgccttgcttttaagcaaacagtttgtggctttgatttgttacgggccaatggacagtcctatgtctgtgatgtcaatggcttcagttttgtgaaaaattccatgaagtattatgatgactgtgcaaaaatacttggaaatattgtaatgcgagaacttgctccacaatttcatattccatggtcaatacccttagaagctgaagatatcccaattgtaccaactacatctggaactatgatggaacttagatgtgtcatagctgttatacgtcatggggatcgaacaccaaaacaaaaaatgaaaatggaagtgagacatcagaaattttttgatctttttgaaaagtgtgatggatataaatcagggaaattaaaactcaaaaaaccaaaacagttacaggaagtgctagatattgcacgacagcttcttatggagctagggcaaaataatgattctgaaattgaagaaaacaagccaaaacttgaacaacttaagactgtattagagatgtatggtcatttttctggaataaatcgtaaggttcagttgacctatctccctcatggttgtcctaaaacatctagtgaagaggaggacagccgaagagaagaaccatctttacttttggttctaaaatggggaggtgaattaactcctgcaggcagggtccaggctgaagaacttggaagagccttcaggtgtatgtatcctggaggtcaaggagattatgcaggatttcctggttgtggtttacttagattacatagcacctacagacatgacctcaaaatatatgcctctgatgaaggacgagtccagatgactgcagctgcttttgcaaaggggcttttagctttggaaggagagcttacacccattcttgttcaaatggtgaaaagtgcaaatatgaacggtcttttggatagtgatagtgactctctgagcagttgtcagcaacgtgtgaaggcaaggcttcatgaaatacttcagaaagacagagattttactgctgaagattatgaaaagcttactccatctggaagcatttctcttatcaaatcaatgcatttaattaaaaaccctgtgaagacctgtgataaagtttattccttaattcagagtttgacttctcaaatcagacatcgaatggaagatcctaaatcatcagatattcagctttaccatagtgaaacattggagcttatgctacgtagatggtccaagttagagaaagactttaaaacaaagaatggaagatatgatattagtaaaatccctgacatatatgactgtataaaatatgatgtccagcataatggttccttgaaattagaaaacacaatggaattatataggctttcgaaggcattagcagatattgttatccctcaggaatatggtataactaaagctgaaaaactggagattgccaaaggctactgtactcctctggttagaaaaattcgctcagaccttcagaggacacaagatgatgacactgtaaataaacttcatcctgtgtattctagaggtgttctgtctcctgaacgtcatgttcgtactagattatattttaccagtgaaagtcatgtacattctttgctgtctattcttcgctatggtgccttatgcaatgaatcaaaggatgaacagtggaaacgagctatggattatttaaacgttgtcaatgagctcaactacatgactcagattgttatcatgctttatgaggatcctaataaggatctttcctcagaagaacgctttcatgttgaattacactttagtccgggagccaaaggttgtgaagaagacaaaaatttgccatctggctatggatatagaccagcttccagagagaatgaaggcaggagaccttttaaaattgataatgatgatgaaccacatacttctaaaagagatgaagttgatcgagctgtgatattgtttaaaccaatggtatcagagccaattcatatacacaggaagtctccacttccaagatctaggaagacggctacaaatgatgaagagagccccctgagtgtgtctagcccagagggtactggtacctggctgcattataccagtggtgtgggtactgggcgtcgaagacgcagatcaggggaacaaatcacttcttcccctgtctcccccaaatcattggctttcacatccagtatttttggctcatggcaacaggttgtatctgaaaatgctaattacctgcgaacaccaagaactcttgtggaacagaagcagaatcctactgtagggtctcactgtgcgggcctgtttagcacctcggtgctcgggggttcttcaagcgcacctaacctacaggattatgctcgtactcatcgtaaaaagctgacctcttctggctgcatagatgacgccacacgcggttctgctgttaaaaggttttctatctcatttgctcgacacccaaccaatggctttgaattgtattccatggtgccatctatttgtcctctagaaactcttcataatgccctatctttaaagcaagtggatgaatttcttgcttccattgcttctccatcatctgacgttccacggaagaccgctgaaatttcctctacagctttacgttccagtccaataatgagaaaaaaagtatctttaaatacgtatacacctgcaaagatcctcccaacaccaccagctaccttaaagagcactaaagcaagcagcaaaccagctacaagtggaccttctagtgcagttgttcctaatacctcatctcggaaaaagaatataactagcaaaacagaaacgcatgaacacaaaaaaaacactgggaaaaagaaatgaaatcttagcagaagctggaactttttatacttataaaaatagtgtgttcttatgtttctccttatgcatttatgtgttcacttaaaaatgtttttaaatctaaggttttctttgtttatgttcaggtaaggaactgttgtcatgatctggaaatgtttaaaacaatgtttgttagcattctgtgagcagcaaaacttatagtgataaaaatcgattgttgttaatatgatgtttaccatgtgcacatagtaatgaaaaggaacataaaagcccagcaggctcgtaccaaagtcacagcagtaatgctatgtactgcagagtctgatgagctggcctttgtgcacacttttattttcatgggattgcatcttagctgttaaaacttctagattgaaatttgacagccagggttacatattggggacttttaaagtgtctttccaaagagatttcattaaccgtttagattagaatatctttcccaattgttacagtgacatatatgctgcaatatttaacaactggagtattagccacatgggttattttttcaatctgtgttttgaatttttttattgtgtgttatttaaaatattacatatgcagctgggagaactacacctttgtgcacatagatttatatattaatttgtagaaaatattttctttatatatttccttaccatacaaggtgccttgttcatcaggaaaacttttgttttgtattttgacaagaaaggcaccttcagagtttctttttaagtatagttgacaagtgtataaatgttacacttactttcagagttctttttagatctaaagaagtcagttcaaaaatggaaatcaacaatgttaggagaaatctgaattctgttaagttagtaagtattatgtatagcatctgtttttaaccatttccattcttatccctagtgtatcagttgatcacactaagaaagcttaaagattgagcatttgaaataaatgctctttataaatgattagatttttgaagggatattgaaatcattgcgctgtgatttcatctgtgatgtgaaaaatcaatttattatccttggtgctttcccccccaccaatgcacaaataattgtgaacagcttgaaatgacttaaactgtaatccaaatgggacaatctgataagaatttcatgcattggtagttaaataacttaaattgctaaagctttagcttgaaatttatgtttagaaaaactattgatttcccatggtatgaatataactattgtaattcttcaaatgagactcttctcaccttaaatagtcatatattaattaacttataggaaataagcatactatatgttagctgttttaaaaggtaccagatgtaagagtcataaatatatgcaattaaagaagttcatagatttcacacgaatgtaaatgtgttatatggagacatgtcttgtaaacagttgaatgtatgtaagttttctgtttgtgaaaatgtagttaatgtactcactgtggaggtcataaggaagctactttttttttaaagtggaacctaattaaaatatttcccagaatc

SEQ ID NO: 734 - DNA, 5112 bp, Homo sapiens
gtagctggggtgaggccgtcgtcgccgcacgggctggttggggctgtgtctgtgggaggcgccggggtgatggcggtggagactctgtccccggactgggagtttgaccgcgttgacgacggctcgcagaaaattcatgccgaagtccaacttaagaattatgggaaatttcttgaggagtatacctctcaactgagaagaattgaggacgctctggatgactcaattggagatgtttgggatttcaatcttgatcctatagcattaaagcttttgccttatgaacagtcctctcttttggaactcataaagactgaaaacaaggtcttaaacaaagtcatcactgtttatgctgcactttgttgtgaaatcaagaaattaaaatatgaggctgaaactaaattttacaatggtctcttgttttatggagaaggagctacagatgccagcatggtggaaggtgattgccaaattcaaatggggagatttatttcattcttacaggaactgtcttgctttgttacgaggtgctatgaagtggtgatgaacgtagtccaccagttggctgccctctatatcagtaacaagattgcacccaaaattatagagacaactggagttcattttcagactatgtatgagcacttgggagaactgctaacagttttgctcaccctggatgaaattattgataatcatatcacactgaaagaccactggactatgtacaaaaggttactgaaatctgtccatcacaatccttcaaaatttggaattcaggaagaaaaattaaagccatttgaaaagttcttgctgaagctagaagggcaattactggatggaatgatattccaggcctgtatagaacaacaatttgattctctcaatggaggagtatctgtgtcaaaaaatagtacttttgctgaggaatttgcacatagtattcggtcaatttttgcaaatgtagaagccaaacttggagaaccttctgaaattgaccagagagacaagtatgttggaatttgtggactctttgtattgcactttcagatttttcgaactattgataaaaagttttataagtctttattggacatttgtaagaaggtaccagccatcactctaactgctaatattatttggtttcctgataattttctgatccagaaaataccagcagctgccaaactgctagacagaaaaagtcttcaagccattaaaatacacagggatacttttctacaacagaaagctcaatcacttaccaaagatgtacagtcttactacgtctttgtgagctcatggatgatgaaaatggaatctattttgtctaaagagcagagaatggataaatttgctgaagatctcaccaatagatgtaatgtttttatacagggcttcttgtatgcatatagtattagtaccattattaaaaccacaatgaatctctacatgtccatgcaaaagccaatgaccaaaacctcagttaaggcattgtgcaggcttgttgaacttctcaaggcaatagagcatatgttctacaggagaagcatggttgtggctgattcagtttcacatataacacagcaccttcaacatcaggctcttcattctatttctgtggccaagaaaagagtgatttctgacaaaaaatacagcgaacagcgtcttgatgtgctctctgctctagttttggctgaaaacactctaaatggaccaagcacaaagcaacggcgacttattgtttctttggcactaagtgttggcacacaaatgaaaacatttaaagatgaagaactctttccacttcaagtagtcatgaaaaaactggatcttattagtgaacttagagaacgagtccaaacacaatgtgactgttgttttttatactggcatcgagctgtcttcccaatttatttagatgatgtatatgaaaatgctgttgatgcagccagattacattacatgttcagtgctttgcgcgactgtgtacctgctatgatgcatgcaaggcatttagagtcctatgagatacttctggattgctatgacaaggaaattatggaaattttaaatgagcatttgctggacaaattatgcaaagaaatagagaaagatctgcgactttctgtgcatactcatttaaagctggatgaccgaaaccctttcaaagttggcatgaaagacctggctctttttttctctctgaatccaattcggtttttcaatcgtttcattgacattcgggcttacgtaactcactacctagacaagactttctacaatctaacaactgtagcccttcatgactgggccacttatagtgagatgagaaacttagctactcagcgttatggactggttatgacagaggcacatcttcccagtcagactttggaacagggccttgatgttttagaaattatgagaaacattcatatatttgtgtcccgatacctctataatctcaacaatcagatttttattgaacgaacaagcaataacaagcatttgaatactattaatattcggcatattgctaattcaattcgaacacatggcacgggaattatgaatacaactgttaatttcacctaccagtttttgaaaaagaagttctatatatttagccaatttatgtatgatgaacacatcaaatccagattgattaaagatattcgatttttcagggaaattaaggaccaaaatgatcataagtatccttttgatagagcagaaaaattcaatcgaggcatcagaaaacttggaataacacctgagggacagagctaccttgatcaattcaggcaactcatcagccagattggtaatgctatgggctatgtacgaatgataagatctggtggtcttcattgtagcagcaatgccattagatttgttcctgatcttgaagatattgtaaattttgaagaactagtaaaagaagaaggtcttgcagaagaaacattaaaagcagcaaggcatttggattcagtcctcagtgatcacacacgaaattctgccgaaggcacagaatatttcaaaatgcttgtagacgtttttgctccagaatttcgaaggccaaagaatatacatctccgaaatttctatataattgttccccctctgaccctcaactttgtagagcattccattagttgcaaggaaaaattaaataaaaaaaataaaattggagctgcctttactgatgatggctttgccatgggtgtggcttacattctaaagcttttggatcagtatcgggagtttgattcacttcactggttccagtctgttagagagaaatacctgaaggagataagagcagttgctaagcaacagaatgtacagtcagccagtcaagatgaaaaactcttacaaaccatgaatctcactcagaagcgactggatgtctatctacaggaatttgaattgctgtatttctcactgagcagtgcaagaattttcttcagagcagacaagactgcggctgaagaaaaccaagaaaagaaagagaaggaagaagaaactaaaacaagcaatggagacctgtctgacagcactgtgtctgctgatcctgttgtgaaatgatacggatggtattcactgcacatatgatgaaatcatcagaattgttaaaacttttgccagtggaatggataaactattgatgaattgtttcctgggtcacatctctggaaaatagatgttacagttcttaaaggcagtgctttaaagtgaagttcattctgtttccaaaggctctactttcaaaggttaagaatgagattttaaaattggatttttgcctggacttgagggtacaagatgtttctatttgaagtgaagttataaaagggcaaatccagattcataaactatcacctcggatttcttgtaatctacatgtttgtaatttgtatttgcatagatctttgatctatagttatttcaagtcatgggaaattcaatgcatatactatatacagccagtaaatacatgcttaacaaaaggaatgagcctgaagttcataaagaatacatatcaatattcttataaaaggaatatatgaagatggctttgatactagaggtgaggcacaagtgttttatgtactctcagtgtacagtataactgatgatccttctttcattgttaatttcatgtgactcacaagagctgctgatgtctttgatgagacattttataactagtttacattgctttgagaacatttaacctccaacagctgctttaaatttaagatttacttaatactcagaaaattcagataaagccatagagtcctgtttgaagcttcacttctattttggttgaaggcatgatgtatgatgtcagaaaaaaaattgaatgaattatttctacatccaaactcaggtttcttctacattagattgaattgaaattttggtgatggtttgggtagactttttttttatatcaagtataatttaaaacatcagattaaataattacactgttcaggcttttaaaaaaataccactgtgagaataaagcgctagtaagatacatcacttactgattttaaaaatacagaaagattttgagtaaattttgtgcccagcaagctgttagttttatttttgtaaaggtatgtaagttattaaatggttaatcatggccttttaaaaataaaataaagtgatacctttacaatgaagacaaaagtttaaaactttctaatacaaacaccattttgggaaatgcttgatttttttctattgcatttgtctgctaaacatttctttggataaatcctgcaaatacttctaacattattctttgattccagcttttagaatgggtgtacaatgccctgtttgtacttaatggttagggtcagggtaacttgccagcccaagataaatactttaatcgttaaaagtcagaagagacagaatatgtaggaaatgttttttgtttattatgtaaacatggcttacagaattatgaacagtggatagattaaaggcatttaatatttgtaattcataataactgtagaaatggccctaaagcatgctgcataattaataatttatattttcattattataagtgtttatatt

SEQ ID NO: 735 - DNA, 2427 bp, Homo sapiens
gacatcggctccaacaggggtgttccacagggtagctgggagttggaagagccaagaacgcctccgagctctggatttgagcttctctgcccatgggtgaagcgcccatgctcagcttgtgagcttcttcccgggagagcagccatggcactgaggaatgtgccctttcgctcagaggtcctgggctgggaccccgacagccttgctgactatttcaagaagctcaactataaggactgtgagaaggcagtgaagaagtaccacatcgatggggctcgcttcttgaacctgacagaaaatgacatccagaagttccccaagctccgggtgccgattctcagtaagttaagtcaggaaatcaacaagaacgaagagaggaggagcatcttcacacgcaaaccccaagtcccgcggtttcctgaagagacagaaagccacgaagaggacaatgggggctggtcgtcctttgaagaagacgattatgaaagtcccaatgatgaccaggatggggaggatgatggagactatgagtcccccaatgaggaggaagaggcacccgtggaagatgacgcggattatgagccgccaccctccaatgacgaggaagctctgcagaactccatcctgcctgccaagcctttccccaactccaactccatgtacatcgaccggcccccctctgggaaaaccccccagcagcctcctgtgcccccccagagaccgatggccgccctcccgcccccaccagccggccggaatcactcgccactgcccccaccccagaccaaccacgaagaacccagcagaagcagaaaccacaaaacggcaaagctccctgctccttcaatagacagaagcacgaaacctcccctagatcgttcattagctccgtttgatagagaacccttcacactaggaaagaaaccaccattttctgacaagccctcgattccagcgggaaggtcactcggggagcatttacccaagattcaaaagcctcctttaccaccgaccacggaaagacatgaaaggagcagccccctgccagggaagaagccacctgtgccaaagcatggatggggaccagacagaagagagaatgatgaagatgatgtgcatcagagacctttgccccagccagcactacttcctatgagctccaacactttcccttcaagatctactaagccaagtcccatgaaccctctcccatcctctcacatgcctggagcattctcagaaagtaacagcagttttccacagagtgcctccctgccaccatacttctctcaaggccctagcaacagaccacctatcagagccgaaggcagaaacttccccttgccacttccaaacaaacctcggcccccatcccccgcggaggaagagaattcattaaatgaagagtggtacgtttcttatattacccgaccagaggcagaagctgctcttagaaagataaaccaggatggcacatttctggtcagagacagctctaaaaaaacaacaaccaatccatatgtcctcatggtgttgtacaaagataaagtttacaacatccagatccgttatcagaaggaaagtcaagtttacttgttgggaactggactccgagggaaagaggactttctgtctgtgtcagatattattgactacttcaggaaaatgccacttctgctcattgatgggaaaaaccgaggttccagataccagtgcacattaacgcatgctgcagggtacccatagcaagttatagccgagcaaatgaaccgtcctcctgcctctgttgccaacacgagatcaatcagccttggtcaatggacaaacacttaggactgaactgaacccctccccatgaacacaagggttttatcctttcctttaaaaacagtgtttgaaatgaagactgtcaactatcccataatttatttattcttcttcaatgtttgtaaagtgcatgagtcatgttcacacttgaagtctagtagtgcactgtaataattcattttttaaaagattatttaatgcccatttcaaaatacagtagtttacacagctacagaaacaatttggggcaagttttaaaacactgaaacagtaatagttattggtgtcacataaaactgatttgttttttacagccaaacctctgtcagtcagaggcattcattagttttatacatgtaatttgaaaatcactaaacctcgttttctcagcagcaataatttaagaggcttcaaaaatataatttcactcttatttagtattttttcctgggggcatttttacgtaatttttttatgaaaagacaaatgcatgttgagataacttctgggattaaaatagtcttttgctttaaaaaaaaaaaaaaaaaaaaaaaaaaaaaaaaaaaaaaaaaaaaaaaaaaaaaaaaaaaaaaaaaaaaa

SEQ ID NO: 736 - DNA, 1055 bp, Homo sapiens
cccacgcgtcgcctgcccgttcctatgtcctgcggacgcctggaccatgctgctgagcgcctactggcacggcctccacccgggctactacctgagcttcctgaccatcccgctgtgcctggctgccgagggccggctggagttagcgctgcgggggcggctgagcccagggggccagaaggcctgggactgggtgcactggttcctgaagatgcgcgcctattactacatgtgcatgggcttcgtgctgctctccttggctgacacccttcggtactgggcctccatctacttctgtatccacttcctggccctggcagcgctggggctggggctggctttaggtgggggcagcccagccggcggaaggcagcatcccagcgcaccagccttgagccggagaagctccgggaggagtaagctgtcacgacgctccctctgccagctggtcccgggaattctgtgaaccaggctgctgtctcctccccagaaagagtccttaccttggagagggtcctggagagaatttcctcttccccagctaaataccctgcctgcaactgaagcagacccgggggtgtcctccctgccctctgcccagaggcacctccactcctacaaaatcaaagtattgtccagacaagagtcactggcccctgctccagcttctgggtatccagagagcactgcacttccccaaaacggaaggggcccctgggcagtgggttttgggcaaattccctttctttgcatccacaatgtgggtcggagcttgggggcaggtcctgggagtgggaagcctcttccttgtgtctttcgctccacttttagctcatcgcaccaatattgcagacttggaaggaagcataagcttccaatttcacaaaggggaaactgaggtgcgggtgcgcgggcctggggacggccgtcccatggcttccatctgagccacctcgggaccccagcactcctggcgccctcttcttcatcgcttggcctatgacaggtcaccgtgtgtaaatctttcccaataaagtgttgcacaaaggaaaaaa

SEQ ID NO: 737 - DNA, 2897 bp, Homo sapiens
cgcagctcagcctgggcggcacagccagatgcgagatgcgtctctgctgatctgagtctgcctgcagcatggacctgggtcttccctgaagcatctccagggctggagggacgactgccatgcaccgagggctcatccatccacagagcagggcagtgggaggagacgccatgacccccatcctcacggtcctgatctgtctcgggctgagtctgggccccaggacccacgtgcaggcagggcacctccccaagcccaccctctgggctgaaccaggctctgtgatcacccaggggagtcctgtgaccctcaggtgtcaggggggccaggagacccaggagtaccgtctatatagagaaaagaaaacagcactctggattacacggatcccacaggagcttgtgaagaagggccagttccccatcccatccatcacctgggaacatgcagggcggtatcgctgttactatggtagcgacactgcaggccgctcagagagcagtgaccccctggagctggtggtgacaggagcctacatcaaacccaccctctcagcccagcccagccccgtggtgaactcaggagggaatgtaatcctccagtgtgactcacaggtggcatttgatggcttcagtctgtgtaaggaaggagaagatgaacacccacaatgcctgaactcccagccccatgcccgtgggtcgtcccgcgccatcttctccgtgggccccgtgagcccgagtcgcaggtggtggtacaggtgctatgcttatgactcgaactctccctatgagtggtctctacccagtgatctcctggagctcctggtcctaggtgtttctaagaagccatcactctcagtgcagccaggtcctatcgtggcccctgaggagaccctgactctgcagtgtggctctgatgctggctacaacagatttgttctgtataaggacggggaacgtgacttccttcagctcgctggcgcacagccccaggctgggctctcccaggccaacttcaccctgggccctgtgagccgctcctacgggggccagtacagatgctacggtgcacacaacctctcctccgagtggtcggcccccagtgaccccctggacatcctgatcgcaggacagttctatgacagagtctccctctcggtgcagccgggccccacggtggcctcaggagagaacgtgaccctgctgtgtcagtcacagggatggatgcaaactttccttctgaccaaggagggggcagctgatgacccatggcgtctaagatcaacgtaccaatctcaaaaataccaggctgaattccccatgggtcctgtgacctcagcccatgcggggacctacaggtgctacggctcacagagctccaaaccctacctgctgactcaccccagtgaccccctggagctcgtggtctcaggaccgtctgggggccccagctccccgacaacaggccccacctccacatctggccctgaggaccagcccctcacccccaccgggtcggatccccagagtggtctgggaaggcacctgggggttgtgatcggcatcttggtggccgtcatcctactgctcctcctcctcctcctcctcttcctcatcctccgacatcgacgtcagggcaaacactggacatcgacccagagaaaggctgatttccaacatcctgcaggggctgtggggccagagcccacagacagaggcctgcagtggaggtccagcccagctgccgatgcccaggaagaaaacctctatgctgccgtgaagcacacacagcctgaggatggggtggagatggacactcggcagagcccacacgatgaagacccccaggcagtgacgtatgccgaggtgaaacactccagacctaggagagaaatggcctctcctccttccccactgtctggggaattcctggacacaaaggacagacaggcggaagaggacaggcagatggacactgaggctgctgcatctgaagccccccaggatgtgacctacgcccagctgcacagcttgaccctcagacgggaggcaactgagcctcctccatcccaggaagggccctctccagctgtgcccagcatctacgccactctggccatccactagcccagggggggacgcagaccccacactccatggagtctggaatgcatgggagctgcccccccagtggacaccattggaccccacccagcctggatctaccccaggagactctgggaacttttaggggtcactcaattctgcagtataaataactaatgtctctacaattttgaaataaagcaacagacttctcaataatcaatgaagtagctgagaaaactaagtcagaaagtgcattaaactgaatcacaatgtaaatattacacatcaagcgatgaaactggaaaactacgagccactgcgcccggccacattcagttcttatcaaagaaataacccagacttaatcttgaatgatacgattatgcccaatattaagtaaaaaatataagaaaaggttatcttaaatagatcttaggcaaaataccagctgatgaaggcatctgatgccttcatctgttcagtcatctccaaaaacagtaaaaataaccactttttgttgggcaatatgaaatttttaaaggagtagaataccaaatgatagaaacagactgcctgaattgagaattttgattttttaaagtgtgtttctttctaaattgctgttccttaatttgattaatttaattcatgtattatgattaaatctgaggcagatgagcttacaagtattgaaataattactaattaatcacaaatgtgaagttatgcatgatgtaaaaaatacaaacattctaattaaaggctttgcaacacaaaaaaaaaaaaaaa

SEQ ID NO: 738 - DNA, 1237 bp, Homo sapiens
gccgagaggagaggagaatggcggcggaaggctggatttggcgttggggctggggccggcggtgcctgggaaggcctgggcttctcggccccggccctggccccactacacctctctttcttcttttgttgttggggtctgtgactgcggatataactgacggcaacagtgaacatctcaagcgggagcattcgctcattaagccctaccaaggggtcggttccagctctatgcccctctgggacttccagggcagcactatgctcacgagccagtacgtacgtctgacccctgacgagcgcagcaaagagggctctatctggaaccaccagccgtgcttcctcaaagactgggaaatgcacgtccacttcaaagtccacggcacagggaagaagaacctccatggagacggcatcgccttgtggtacacccgggaccgcctcgtgccagggcctgtgtttggaagcaaagataacttccacggcttagccatcttcctggacacctaccccaatgatgagaccactgagcgcgtgttcccgtacatctcggtgatggtgaacaatggctccctgtcctacgaccacagcaaggatgggcgctggaccgagctggcgggctgcacggctgacttccgcaaccgcgatcacgacaccttcctggctgtgcgctactcccggggccgtctgacggtgatgaccgacctggaggacaagaacgagtggaagaactgcattgacatcacgggagtgcgcctgcccaccggctactacttcggggcctccgccggcaccggcgacctgtctgacaatcatgacatcatctccatgaagctgttccagctgatggtggagcacacgcccgacgaggagagcatcgactggaccaagatcgagcccagcgtcaacttcctcaagtcgcccaaagacaacgtggacgaccccacggggaacttccgcagcgggcccctgacggggtggcgggtgttcctgctgctgctgtgcgctctcctgggcatcgttgtctgcgccgtggtgggggccgtggtgttccagaagcggcaggagcggaacaagcgcttctactgagtggcgcctccggcggggcctgtccctgggcccaggagccaatgtgaacttttttttttaccgggattataaaagaacaacaagatgaccttatttcttaactgtttcaaataaatgattaaagtattttcaaaaaaaaaaaaaaaaaa

SEQ ID NO: 739 - DNA, 5423 bp, Homo sapiens
cccgggccaccgcctccgcccggctgcccgcccggactgtcgcggcccgcggtggcgacggcggccgctgcaaagtttccccggcggcggcggcccgggggcgcatcctcccgcaactgtcaagcgctggcggcggaaatgatgaggcgctggccattttccgagcccgggtttcctgcctgagccccgctcgagcgagccgcgagcgaggagccggcgggcgggagaggacgcgcccagggcgggggcccgcccgccccctcgggatttcgagggcccgggggcgcgcgacgccatgggccggccgggcccagagctcctgtctctcagcccggccgcaccacctgggtctccgccatgaacgggcctgccctgcagccctcctcgccctcttccgcgccctcagcctccccggcggcggccccgcggggctggagcgagttctgtgagttgcacgccgtagcggcggcccgggagctggcccgccagtactggctgttcgcccgggagcatccgcagcacgcgccgctgcgcgccgagctggtgtcgctgcagttcaccgacctcttccagcgctacttctgccgcgaggtgcgcgacggacgggcgccgggccgcgactaccgggacacaggccgtgggcccccagccaaggccgaggcgtccccggagccaggccccggccccgccgcccctggcctgcccaaggcccgcagctctgaggagctggccccgccgcggccgcccgggccctgctccttccagcactttcgccgcagcctccgccacatcttccgccgccgctcggccggggagctgccagcggcccacaccgctgccgcccccgggacccccggagaggctgctgagacccccgcccggcctggcctggccaagaagttcctgccctggagcctggcccgggagccgccacccgaggcgctgaaggaggcggtgctgcgctacagcctggccgacgaggcctccatggacagcggggcacgctggcagcgcgggaggctggcgctgcgccgggccccgggccccgatggccccgaccgcgtgctggagctcttcgacccacccaagagttcaaggcccaagctacaagcagcttgctccagcatccaggaggtccggtggtgcacacggcttgagatgcctgacaacctttacacctttgtgctgaaggtgaaggaccggacagacatcatctttgaggtgggagacgagcagcagctgaattcatggatggctgagctctcggagtgcacaggccgagggctggagagcacagaagcagagatgcatattccctcagccctagagcctagcacgtccagctccccaaggggcagcacagattcccttaaccaaggtgcttctcctggggggctgctggacccggcctgccagaagacggaccatttcctgtcctgctacccctggttccacggccccatctccagagtgaaagcagctcagctggttcagctgcagggccctgatgctcatggagtgttcctggtgcggcagagcgagacgcggcgtggggaatacgtgctcactttcaactttcaggggatagccaagcacctgcgcctgtcgctgacagagcggggccagtgccgtgtgcagcacctccactttccctcggtcgtggacatgctccaccacttccagcgctcgcccatcccactcgagtgcggcgccgcctgtgatgtccggctctccagctacgtggtagtcgtctcccaaccaccaggttcctgcaacacggtcctcttccctttctcccttcctcactgggattcagagtcccttcctcactggggttcagagttgggccttccccaccttagttcttctggctgtccccgggggctcagcccagagggtctcccagggcgatcctcaccccccgagcagatcttccacctggtgccttcgcccgaagaactggccaacagcctgcagcacctggagcatgagcctgtgaatcgagcccgggactcggactacgaaatggactcatcctcccggagccacctgcgggccatagacaatcagtacacacctctctgaccagtgaggaattccaggcctcaacagctgcccttgaggagcacaggcagaagtgtgaacttgtgaatgtaattgatctttccttccttccagagaaagatttaagggacactgttaactgctcgtgccagtttggaagtgacccttctattaggcctgttgaagggccctcctgtaggtttcatctatccacctggctttctccttattgtttacagatgtagttcttgttagaggatgccgctagctcctgcccggggtccctatgcccagtccccgttactcttagagaaaggagttggggtgagggccagagctggcagtggaaacttgttctctttttcactgacactgtcacagcggatgacagactttctacggggaggagggggggatcatcaggaagcccagaacactaacaagcggttctcccatctaccgtcagtccacatggcaggtctgctgtgtccacaccacagatgaccacatctaatcctgcttctactctcagctttaggacaaaagctctgtcagaggcacaagctgaaggtcaaaaatgatttaaaacattttacctcagactaatttctttaaaggattcaggttcaaaacttaaccactgcttatttcagtgcactgtttcaactaacacccatgctatttttgtagtcagaaacagctatgcaaaccctacctaatttacagtctgagccagcatgctggcttgtctactgcatcctcgggacagtcacctgccactgagtggccactgtccttcctaaatgtcaagaagtgaagtatgtcaccctttcagggaaattcaggcaattactgaaataggaaggtggcaagaacagttctatcctggtgccttacgaataaaaaactggattctggtttacagcagctttacagtgatagttaaattaactggggctaggggaaaagcaaccaaaaagggaaaaaggactcctaggccctttctattaaatccttcagcaacaaggctggcttggtgccctccaagcatctaatggcttattaaattatcccacaattgggttttaggctccttttttgacccaaaatggaagctgggaatctggtgccataactaatgagaaactcctttaataccccacaatcagtgttctgttctacctggctactgcttcactggattgaaaatctatctatctccttgcacacatgggcacacacaatctccaccatccagggaggtcctgaattcaaatctctatctatccaagtgatacaattcatagggggctggctcctcccagaacctgtctggaggctcagaaacgggggcagtgacagtggagtcagctgctcttgggtgccagcagagccattcagtacaacccccaggctcacagcagtggcttctaggaaactgggagtttagatcagctttacagatacatcgatcagaggctaaaatgaaacctcagcctaaaactcataggactgactgcctgggaggagggttaggtctgcttcttccacttatacttagtctctgtgctccaagaggtcaaatttttgcttctagaatttccttggggtctttcagagggtgggggaacaaacccctatgcacttttcttttttttttttgagatggagtttctcttgtcaaccgggctggagtgcagtggtgcaatcttggctcactgcaacctccaccttcctggttcaagcgattctgcctcgacctctcaagtagctgggattacaagcaccagccaccatgcctggctaattttgtatttttagtagagacagggtttcaccatgttggccaggctggtctcgaatgtctgacctcaggtgatccacccgccttggcctcccaaagtgctgggattacaggcgcgagccaccgcgcccagcctacaccacttttagtaccaacactcttgggtgatttcatggaccctaaagcagacctgacactgatccagatttgcagtccatttttaaggacacctgtctttatttcctcaaagtcaagcagctttctctggaaaatgaatgctaattagtgtgaaccaaaagagtaagtaagagtctgaagtttttttaaaggagaaagcttattatggaaagtcactggtcctcccctccgcacaggaaaggtacccagtagataatgaaccaaattaagttccctccctccagccagaagttaaacatctgggatatgacgtcttcatgccaggggcactcatttcttagcagcctctctacatacatctctcaggtggtgccaagaggcacaccaggtagagcaaacttagcagctctgactaacaggctgcaaagtgcaagttcagattctgtggcagagatttggagggcacccacgtccagactgcttcccgtccaagttaccaggacagctcaaaaacatgctgacagaaaactcccatggctctaggaaaaagtgacactaagccaacacctttctttatgtgggagcaaaatcagctgatgaaggggtgggcaccattgtggggcaggcaccccactggctgcagctagcccaccataggcacagcacatcccaccactctccttccagtcctgaccaggccccagccggcaacttctaccgagagccatggctcaacaccaaactggacagtagacatcatgatccctccagttagctctaattacagaccccaccagtacagcttgacagctcccggcaccatcccttccttcatctgacttattgaacttttacaaactaacagtcaccagcaccaaagaattaagtcaactaacctgccttgaattttaaaccagcaatccatatggctttatctggtataaatcttctgcctttgatcatttctggaccgtaggaaaaaggaatagcaatcattaaaatcttgggccagagaacactatttttacataacagtttcttaacctaaagtcaaggccttggactcttccctgagggttgcctgaaattccttcatgctttctattcaggactaattcccttactgcaaatgtgttagctctaacatctcccacaagctaaaggaacttgcaagtatattaacaaggacacatctgacatcctgtgtttggttaaaatatacagcacattgtgataacataaagtggatccatcttgtatcattataggcaaaaggtatttggcaaatttttatgtatggttttatgtactgtacaagtaacttattcttgaataatgcaaattttgctataatgtacaaattgctatatgtgaattaaaaagtttccaaaatcttgaaaaaaaaaaaaaaaaaaaa

SEQ ID NO: 740 - DNA, 2284 bp, Homo sapiens
aaccacatcgcccgaccgtgctctttatttttcggtggagcagctctgctttctcaggtctctacttacttatataagatggcatcaagaagaaggacctgaccactggcccctgactacatggtctttggaacccgtggcattggaagatgtcagagacatggcacatggatgtgatcttcaaaaactgttacagcctcatctcattggattggtctacacatcaaggtgctggaagtgtcgcatgcccagagatgatgtggaagctctatacccctttcccttctgcccaccttgccctgtgcatctcttcctgaatggcttctcctgaattgtatcctttataataaactggtaaataggaaagagataatatcttctacttaatcctggatactatatctgaagtcagagcatccactccaaagcagagaatttctgaaaaacaaaataatgtcatcatatgatgttagaattttttttcaaatgatggttcctaatacttcacattagaagaactcgaatttgatgaccagtttgagaaacaccagtatatcaagattacaagaaaaagcgagtcaaaaggatgatcatgaatataacaacttcgaggaaacatttaaccaaagaccaaagctttttaaacaactgagagtttttataagaaaaagacctcatacagtagtccccacttattcatgggggatacatttcaagacccacagagaaggcctgaaatcactgatgtaccaaaccctaaccaggttcttaggatgagctactaaatgacaaatgggtgggtagtacatagagtgtagatacaccagacaaagaaatgattcacagcccaggcaggacagagcagatcacacaagatttcatcacagtactcagaaaaccacaccatttaaaagttatgaattgtttatttctggaattttccatataatatttttgaccacagtttcccatggataactgaaaccatgggaagtggaactgtggataaggcaggactactgtaactatgacatcaatggtaggaacctgaagcataattctgctgtagtggattttttcaaaagaaactcatgaatgaaaaataatttattagatataagaaaggatgcatttgtatctcaaactttacttattctggaaataaatgaaaagccaacacctattacataccgacaaaaatgaaaaaataaataaatataaagccatagttcagtactgatggaatctgagaaaatttatatgaccgcgaacccatatctctgtactgaatgtgggaaaggctacacttgtcttgcatccctgacccagcatcagaaaacacatattggagaaaaaccttatgaatgtaaaatatgtggtaagtcctttacccggaacagtaatcttgttcaacatcaaagaatacatactggagagaaaccttatgaatgtaatgaatgtgggaaagcttttagtcagagcactaatcttattcagcatcaaagagtccatactggggagaaaccttatgagtgtaatgaatgtgaaaaaacctttagtcataggtcatcccttagaaatcatgagagaatccatactggagaaaaaccctatccttgtaatgaatgtgggaaagctttcagccatatctctgcccttactcaacatcatagaattcatactggaaagaaaccatatgaatgtactgaatgtggaaaaaccttcagccgcagcacacacctaattgaacatcagggaattcattctgaggaaaaatcctaccagtgtaagcaatgtcggaaagttttttgccacagtacatcactaatccgacatcagagaacccacacaggagagaaaccatatgaatgtaatgaatgtgggaaagctttcagccataccccagccttcattcaacatcaaagaattcatactggagaaaaaccctatgagtgtaatgcatgtggaaaggccttcaatcggagtgcacatcttactgaacaccagagaactcatactggagagaagccctatgtttgtaaagaatgtggaaaaaccttcagtcgaagtacacaccttactgaacatctaaaaattcattcttgtgtgaaaccctatcaatgtaatgaatgtcagaaactgttttgctatagaacatcactaattcgacatcagaggacgcatacaggagagaaaccctaccagtgtaatgaatgtgggaaatccttcagcttaagctcagctctaactaaacataagcgaatacatacaagggagagaccct

SEQ ID NO: 741 - DNA, 6846 bp, Homo sapiens
gtcagatccgagctcgccatccagtttcctctccactagtccccccagttggagatctgggaccaacaaggcaccatggcgcagaagggccaactcagtgacgatgagaagttcctctttgtggacaaaaacttcatcaacagcccagtggcccaggctgactgggccgccaagagactcgtctgggtcccctcggagaagcagggcttcgaggcagccagcattaaggaggagaagggggatgaggtggttgtggagctggtggagaatggcaagaaggtcacggttgggaaagatgacatccagaagatgaacccacccaagttctccaaggtggaggacatggcggagctgacgtgcctcaacgaagcctccgtgctacacaacctgagggagcggtacttctcagggctaatatatacgtactctggcctcttctgcgtggtggtcaacccctataaacacctgcccatctactcggagaagatcgtcgacatgtacaagggcaagaagaggcacgagatgccgcctcacatctacgccatcgcagacacggcctaccggagcatgcttcaagatcgggaggaccagtccattctatgcacaggcgagtctggagccgggaaaaccgaaaacaccaagaaggtcattcagtacctggccgtggtggcctcctcccacaagggcaagaaagacacaagtatcacgggagagctggaaaagcagcttctacaagcaaacccgattctggaggctttcggcaacgccaaaacagtgaagaacgacaactcctcacgattcggcaaattcatccgcatcaacttcgacgtcacgggttacatcgtgggagccaacattgagacctatctgctagaaaaatcacgggcaattcgccaagccagagacgagaggacattccacatcttttactacatgattgctggagccaaggagaagatgagaagtgacttgcttttggagggcttcaacaactacaccttcctctccaatggctttgtgcccatcccagcagcccaggatgatgagatgttccaggaaaccgtggaggccatggcaatcatgggtttcagcgaggaggagcagctatccatattgaaggtggtatcatcggtcctgcagcttggaaatatcgtcttcaagaaggaaagaaacacagaccaggcgtccatgccagataacacagctgctcagaaagtttgccacctcatgggaattaatgtgacagatttcaccagatccatcctcactcctcgtatcaaggttgggcgagatgtggtacagaaagctcagacaaaagaacaggctgactttgctgtagaggctttggccaaggcaacatatgagcgccttttccgctggatactcacccgcgtgaacaaagccctggacaagacccatcggcaaggggcttccttcctggggatcctggatatagctggatttgagatctttgaggtgaactccttcgagcagctgtgcatcaactacaccaacgagaagctgcagcagctcttcaaccacaccatgttcatcctggagcaggaggagtaccagcgcgagggcatcgagtggaacttcatcgactttgggctggacctacagccctgcatcgagctcatcgagcgaccgaacaaccctccaggtgtgctggccctgctggacgaggaatgctggttccccaaagccacggacaagtctttcgtggagaagctgtgcacggagcagggcagccaccccaagttccagaagcccaagcagctcaaggacaagactgagttctccatcatccattatgctgggaaggtggactataatgcgagtgcctggctgaccaagaatatggacccgctgaatgacaacgtgacttccctgctcaatgcctcctccgacaagtttgtggccgacctgtggaaggacgtggaccgcatcgtgggcctggaccagatggccaagatgacggagagctcgctgcccagcgcctccaagaccaagaagggcatgttccgcacagtggggcagctgtacaaggagcagctgggcaagctgatgaccacgctacgcaacaccacgcccaacttcgtgcgctgcatcatccccaaccacgagaagaggtccggcaagctggatgcgttcctggtgctggagcagctgcggtgcaatggggtgctggaaggcattcgcatctgccggcagggcttccccaaccggatcgtcttccaggagttccgccaacgctacgagatcctggcggcgaatgccatccccaaaggcttcatggacgggaagcaggcctgcattctcatgatcaaagccctggaacttgaccccaacttatacaggatagggcagagcaaaatcttcttccgaactggcgtcctggcccacctagaggaggagcgagatttgaagatcaccgatgtcatcatggccttccaggcgatgtgtcgtggctacttggccagaaaggcttttgccaagaggcagcagcagctgaccgccatgaaggtgattcagaggaactgcgccgcctacctcaagctgcggaactggcagtggtggaggcttttcaccaaagtgaagccactgctgcaggtgacacggcaggaggaggagatgcaggccaaggaggatgaactgcagaagaccaaggagcggcagcagaaggcagagaatgagcttaaggagctggaacagaagcactcgcagctgaccgaggagaagaacctgctacaggaacagctgcaggcagagacagagctgtatgcagaggctgaggagatgcgggtgcggctggcggccaagaagcaggagctggaggagatactgcatgagatggaggcccgcctggaggaggaggaagacaggggccagcagctacaggctgaaaggaagaagatggcccagcagatgctggaccttgaagaacagctggaggaggaggaagctgccaggcagaagctgcaacttgagaaggtcacggctgaggccaagatcaagaaactggaggatgagatcctggtcatggatgatcagaacaataaactatcaaaagaacgaaaactccttgaggagaggattagtgacttaacgacaaatcttgcagaagaggaagaaaaggccaagaatcttaccaagctgaaaaacaagcatgaatctatgatttcagaactggaagtgcggctaaagaaggaagagaagagccgacaggagctggagaagctgaaacggaagctggagggtgatgccagcgacttccacgagcagatcgctgacctccaggcgcagatcgcagagctcaagatgcagctggccaagaaggaggaggagctgcaggcggccctggccaggcttgacgatgaaatcgctcagaagaacaatgccctgaagaagatccgggagctggagggccacatctcagacctccaggaggacctggactcagagcgggccgccaggaacaaggctgaaaagcagaagcgagacctcggcgaggagctggaggccctaaagacagagctggaagacacactggacagcacagccactcagcaggagctcagggccaagagggagcaggaggtgacggtgctgaagaaggccctggatgaagagacgcggtcccatgaggctcaggtccaggagatgaggcagaaacacgcacaggcggtggaggagctcacagagcagcttgagcagttcaagagggccaaggcgaacctagacaagaataagcagacgctggagaaagagaacgcagacctggccggggagctgcgggtcctgggccaggccaagcaggaggtggaacataagaagaagaagctggaggcgcaggtgcaggagctgcagtccaagtgcagcgatggggagcgggcccgggcggagctcaatgacaaagtccacaagctgcagaatgaagttgagagcgtcacagggatgcttaacgaggccgaggggaaggccattaagctggccaaggacgtggcgtccctcagttcccagctccaggacacccaggagctgcttcaagaagaaacccggcagaagctcaacgtgtctacgaagctgcgccagctggaggaggagcggaacagcctgcaagaccagctggacgaggagatggaggccaagcagaacctggagcgccacatctccactctcaacatccagctctccgactcgaagaagaagctgcaggactttgccagcaccgtggaagctctggaagaggggaagaagaggttccagaaggagatcgagaacctcacccagcagtacgaggagaaggcggccgcttatgataaactggaaaagaccaagaacaggcttcagcaggagctggacgacctggttgttgatttggacaaccagcggcaactcgtgtccaacctggaaaagaagcagaggaaatttgatcagttgttagccgaggagaaaaacatctcttccaaatacgcggatgagagggacagagctgaggcagaagccagggagaaggaaaccaaggccctgtccctggctcgggcccttgaagaggccttggaagccaaagaggaactcgagcggaccaacaaaatgctcaaagccgaaatggaagacctggtcagctccaaggatgacgtgggcaagaacgtccatgagctggagaagtccaagcgggccctggagacccagatggaggagatgaagacgcagctggaagagctggaggacgagctgcaagccacggaggacgccaaactgcggctggaagtcaacatgcaggcgctcaagggccagttcgaaagggatctccaagcccgggacgagcagaatgaggagaagaggaggcaactgcagagacagcttcacgagtatgagacggaactggaagacgagcgaaagcaacgtgccctggcagctgcagcaaagaagaagctggaaggggacctgaaagacctggagcttcaggccgactctgccatcaaggggagggaggaagccatcaagcagctacgcaaactgcaggctcagatgaaggactttcaaagagagctggaagatgcccgtgcctccagagatgagatctttgccacagccaaagagaatgagaagaaagccaagagcttggaagcagacctcatgcagctacaagaggacctcgccgccgctgagagggctcgcaaacaagcggacctcgagaaggaggaactggcagaggagctggccagtagcctgtcgggaaggaacgcactccaggacgagaagcgccgcctggaggcccggatcgcccagctggaggaggagctggaggaggagcagggcaacatggaggccatgagcgaccgggtccgcaaagccacacagcaggccgagcagctcagcaacgagctggccacagagcgcagcacggcccagaagaatgagagtgcccggcagcagctcgagcggcagaacaaggagctccggagcaagctccacgagatggagggggccgtcaagtccaagttcaaatccaccatcgcggcgctggaggccaagattgcacagctagaggagcaggtcgagcaggaggccagagagaaacaggcggccaccaagtcgctgaagcagaaagacaagaagctgaaggaaatcttgctgcaggtggaggacgagcgcaagatggccgagcagtacaaggagcaggcagagaaaggcaatgccagggtcaagcagctcaagaggcagctggaggaggcagaggaggagtcccagcgcatcaacgccaaccgcaggaagctgcagcgggagctggatgaggccacggagagcaacgaggccatgggccgcgaggtgaacgcactcaagagcaagctcaggcgaggaaacgagacctctttcgttccttctagaaggtctggaggacgtagagttattgaaaatgcagatggttctgaggaggaaacggacactcgagacgcagacttcaatggaaccaaggccagtgaataagcaactttctacagttttgcaccacggcaagaaaaccaaaaaccaaaacaaacaaacaaaaaaaacccaacaacaacccagaacaaagcaaaacccagcagactgtacttagcattgtctaaatccattctcaaattccaaatatcacagacacccctcacacaaggaatataaaaaccaccaccctccagcctgggcaacgtagtaaaacctcatctatacaagaatttaaaaataagctgggcgtggtggtacacacctgtggtcccagctactagggaggctgagccaggaagaacgctccagcccaggacttcgaggctgcaatgagctataattgcatcattgcactccagcctgggcaacagagaccctgtctcaaccaccaccaccaccaccacccctactacccctgtattcaaggtaaaaattgaagtttgtatgatgtaagagatgagaaaaacccaacaggaaacacagacacatcctccagttctatcaatggattgtgcagacactgagtttttagaaaaacatatccacggtaaccggtccctggcaattctgtttacatgaaatggggagaaagtcaccgaaatgggtgccgccggcccccactcccaattcattccctaacctgcaaacctttccaacttctcacgtcaggcctttgagaattctttccccctctcctggtttccacacctcagacacgcacagttcaccaagtgccttctgtagtcacatgaattgaaaaggagacgctgctcccacggaggggagcaggaatgctgcactgtttacaccctgactgtgcttaaaaacactttcactaataaatggttataaatc

SEQ ID NO: 742 - DNA, 882 bp, Homo sapiens
actcagggaccggagcagccctcaactcactcttcagcttccctgctgtgttgcagcccagccgctccatcatgtccttcagtgctgaccagattgctgaattcaaggaggcatttctcctgtttgacagaacaggtgattccaagatcaccttaagccaggtcggtgatgtccttcgagctctgggcacaaatcccaccaatgcagaggtcaggaaagttctgggaaaccccagcaatgaagagctgaatgccaagaaaattgagtttgaacaatttctgcctatgatgcaagccatttccaacaacaaggaccaggccacctatgaagactttgttgagggtctgcgtgtctttgacaaggaaggcaatggcacagtcatgggtgctgaactccgccatgttctagccaccctgggtgaaaagatgaaagaggaagaagtggaagccctgatggcaggtcaagaagactccaatggctgcatcaactacgaagcttttgtcaagcacatcatgtctatctgaatggagctctcaagaacaagcattgtttaggaagactggctggaaacttattttaatcacacccatgacaaactctccagatctgtttaccatcattcaggaaaacaaagcaatctggacggttcaagactgagcaactccctgaatttttatacatcttcagtttttctctgaattgaattcataccacacaaacaaagtgtctgctgctctagatgagaagaataaaatattgacaatctcaaatccaagcaccattctttattatctaccatgaatcaacaaacattcttaaaacaataaatcaataaacaattttggtcagtctcaaaaaaaaaaaaaaaaaaaaaaaaaaaaa

SEQ ID NO: 743 - DNA, 1535 bp, Homo sapiens
cctccgctcagtccgggagcgcacgtgggccgcggcgctccgacctccgctttcccaccgcccgcagctgaagcacatcccgcagcccggcgcggactccgatcgccgcagttgccctctggcgccatgtcgcagaacggagcgcccgggatgcaggaggagagcctgcagggctcctgggtagaactgcacttcagcaataatgggaacgggggcagcgttccagcctcggtttctatttataatggagacatggaaaaaatactgctggacgcacagcatgagtctggacggagtagctccaagagctctcactgtgacagcccacctcgctcgcagacaccacaagataccaacagggcttctgaaacagatacccatagcattggagagaaaaacagctcacagtctgaggaagatgatattgaaagaaggaaagaagttgaaagcatcttgaagaaaaactcagattggatatgggattggtcaagtcggccggaaaatattccccccaaggagttcctctttaaacacccgaagcgcacggccaccctcagcatgaggaacacgagcgtcatgaagaaagggggcatattctctgcagaatttctgaaagttttccttccatctctgctgctctctcatttgctggccatcggattggggatctatattggaaggcgtctgacaacctccaccagcaccttttgatgaagaactggagtctgacttggttcgttagtggattacttctgagcttgcaacatagctcactgaagagctgttagatcctggggtggccacgtcacttgtgtttatttgttctgtaaatgctgcgttcctaatttagtaaaataaaagaatagacactaaaatcatgttgatctataattacacctatgggatcaataagcatgtcagactgattaatgtctactgtgaaaatttggtagtaaattttcatttgatattagatataaatatctgaatataaataattttaatatactagtcatgatgtgtgttgtattttaaaaattatctgcaaccttaattcagctgaagtactttatatttcaaaagaatgaataacattgataataaaatcgctactttaaggggtttgtccaaaataaatattgtggccttatatatcacactattgtagaaagtattatttaatttaaatggatgcaggttgtctactaaagaaagattatatataactatgctaattgttcataatcaacagaaaccaagatagagctacaaactcagctgtacagttcgtacactaaactcttcttgcttttgcattataaggaattaagtctccgattattaggtgatcaccctggatgatcagttttctgctgaaggcacctactcagtatcttttcctctttatcactctgcattggtgaatttaatcctctcctttgtgttcaacttttgtgtgcttttaaaatcagctttattctaagcaaatctgtgtctactttaaaaaactggaaatggaaaaaaaaataaatctt

SEQ ID NO: 744 - DNA, 170001 bp, Homo sapiens
gatcacgagctcaagagatggagaccattctggccaacatggtgaaaccccacctatacttaaaaataccaaaattagctgggcgtggtggcgcgagcctgtagtcacttgggaggctaaggcagtagaatcgcttgaactcgggaggcagaagttccagtgagccgagatcacgccacttcactccagcatggcgaaggtgagactccgcctcaaaaaaggaaaaaaaaagccaatccaaatctcctacaagtttggtctctagcaaatcattgtcctgatgcctgaatgtgtactttttcaaaaggcgatcattgctggttaagaatttaagttttcgtggccgggcgcagtgcctcatgcctgtaatcccaacacttttgggaggtcgaggcgggtggatcacgagatcaggagttcgagaccagcctggccaacatggtgaaaccccatctctactaaaaacacaaaaattaggcgggcggctgtaataccagctattcaggaggctgaggcaggagaatcgcttgaaactgtaaggcggaggttgcggtgagccgaaatcgcgccactgcactccagcctggatgaaagagcaaaactccgtctcaacaacaacaaaataagttatggtgatgtttctatattgctcactaagcggtaccctaccttttaatattttcgtaatattcaaaaacacattttaagtctattggaaacaatacttgcaagctctcaagtgaacatttatattgttaccccacactgccttttgtagacgagttttgtcaccaagtcaaaagcagcagcgcgcacgccgcctggacttgggtctgcgatcctactcacgcagatgtgttgcgctcacggattcgccttggtttaaggcccgccgtctgggtgcgagctttctttgtttttagcccttcccgccattttggaaagggtaacttgcagtctctccgcgaagtttccaacttctgtagtctttgagaaccttacgaacgcttcaagcttaaactgaaggaggaaggcccacgggaattataaactgtcacaatccagcttactcactgatatctagtgttaaaatgccacaagaaagctaaacatattcaacataccaacttccctcaagcagaaaacagtggctttaagtactttatgcccaaatcctaaacatgcgagattaagcacgagtaattaaacgttacctgcaaatctacacatgtgcacagtaactacttctcagcaaaaatctggaacaaagcaggataacaagatgtctgctcttttatgaaaaaagtgggcggccctgaaaagggcctttggttgaaaatgaaaataagagtgcagcaagcaggagccttagccaccgaagccgtaaagagtgcgtccctgtcgcttcagcgcgtagaccacatccattgctgtcacggtcttgcgtttggcgtgctctgtgtaagtgacagcgtcacgaatcacgttctccaggaacaccttcagaacaccacgagtctcctcatagataaggccagaaattcgcttgacaccgccgcgacgagcaaggcgccggatagctggcttagtgatgccctggatgttatcgcgcaaaaccttgcgatgacgcttagctcctcccttacccaaaccttttccacctttaccacggccagacatgactaagcaacttctaaaaccaacttaagaaacctaaacgccaaggcaaagcaacgcccttatatgccgggaattcggacctaattgaagactgaaagcgcgcataccggaactttggtcctgcttcttggccccaccccgcatagcccagccctggatgacgtcaccaacgactccagcctttggcatctgagcgccggctccgcggaggcgtctcttgcaattgctgggaaataggaatgagagttttaaggctgttttaacaaccaaatcagattaaataaattaacatgtttaaattgttatcaattgttccttcagttgctttaggacgattggagaggagcctcggtccacaagaccggaagcctgaggagtgcagctttgtccccaaggtcacagtgactggctttctgctgccggctgtaaagcacatgcggaccgaaaccccccttcggaagtgtttgaaaactgcaagatttcaccctctccatcaccaagccaagggaaacataaccaaaagggttttcttcccgatggcgaaggcatgataggttagtgattcgtggtagaattattgccctccgcgcggaggcctgattctattcccagtttgttctcttctttccctgcttattaaaatttgtaattgccatttaaatatctaactgcccctcacaactgcacccagtgtgtaggtttcggggtgggggtttttttttttcctttttttaattttattgagacagggtctcgctatgttgcctgcctgggtcttccaaagtgcagtgactacaggcgtgagctaccgcgcctagcccaccagtgtattgatatttatttttctatccctagttttgttttctgtttgattctggtgattcctttttccaaagtgagttggcaacctgtggtagccaaagaagtaggcaactgctcgtaggttttttcttaaattacgaggtagtctgaacgcatctcctgtaagtagttaagagtactgtgagaccgtgtgcctggcagaacagcagagtggcgcagcggaagcgtgctgggcccataacccagaggtcgatggatcgaaaccatcctctgctaggtcctttttttttctccccccccgtctattttcctgaggatcccttttttttaagttacagttttttaggttaaacaatgacgaaagaaaacaaaatgaacccgagtatttctttaattccagaattacaagcatttccgggaaataatgtgaaactacaatctctgcatgtacaattttgattttcatggacacccaagtgtcattaatcaatatgtcatctgtaaacaaagcaaatttctcttgtttagaggctataccactgttgcagccagttatgacagttgtaagttaacctgccaagcaaggagaatgcttacataaactgagtgccaagggtggggtggggtgggagcccaggaatggagttttatatcttttgatacataattcagaaagcactatttgccaagtagttaaggcaatcgactaggaattcctaaatccccacacagattcttttcacctacaaggatcttaatctcggaaaatgagttgcattttgaggtgggtgtggagtcttcatagcactgattgaactctgacctgagaaaaacatttttgcggaccctactggtaaatgtgtctctactctctaccatcctttaatatctcaaatagaactattcgctgtgcttattttttaaacatatgtgtggactgctttatgcttctctctctcagaaaggattcctattcagatatttatgtgtcacatactgtattaggaactaagaaaaaaaaaaaaccttaagtagtctacagtctagatatgcttttgttgtttttgttttttgttttttgtttgtttatttgtttttgagatgaagtctcactcttgttgcccaggctggagtgcagtggcacgatcttggctcattgcaacctccacctcctgggctcaagagattctcctgcctcagcctcccaagtagctgggattacaggtgcctgccatcacactcagctaatttttgtatttttaataaaggcagggttttaccatgttggccaagctagtcttgaactcctaacctcaggcaatccgccagccttggcctcccaaactgctgggattacaggcttaagccaacgcacctggcccatatgcttttaaacaagtaaatatgtagagtgcaatacagtaattctgtgaaaggattgtacactaagtgcactgggaataaggaaaatagtgcttgtaatcccatgaccacccactaattcagtaattcaccagaagtaatcacatgactcagcatactctcagttaagatttattatatctattgaccattttttgtttgggttaaagaacatgttttaaaaataaaaacaaaaaagattcattacagcacaggatacaatgcaagaaaagcagaaaaaatatgtatatacacaggtaaatgtggctgttactataggactgaatgaaggaggatgaacacagaaatgaagacaaagacaaaaggatttgtttaaaagaaggggtcaaggggctcctagcttctagagaacaagggccctgagcttctacagcccttcgtatttattaggtagagtgaacaaggaggaaggggtaactgtcggtcagctactggatttatcacaggctgacgattgctttctttgttcaacagactctagatattcctatagataaccttaaggaacacggtgcctgggacgtgattgctctcagcattccttctagtggcagatgcacttgtcagtttgccagcatgctgctttcatgagaacagtttgctgtttgctcatataccctccagtggtatattgagttggtcacgtccctcattcctttggcctccaacatctccccctttttgtttttgcattaattgaataaaggcaattccagactgcagctttcaattgccagttggtggtccagccgattttacagaccataaacagaaaacagagacacaataacattattcctataattataaaagagacattgaggtgctgtttaaagtagatccaagggttaagcttctctaaaccttgctggaattagctccaagcttctaaagagggctgatactcttaagtttgcctattcagatcaagaattttactctgtaaatcattaatatcaaaagtaacattggatgtaaaagccccctgcaaatgggcctttacaagtctccatggatattcactttgattatattacacaaattagttacacaaatataagtatggttaaaatgacaatgcaattgctgctgcaactgcaaacattgtatttgttctcctagccacaggacagtagtctttaacattgccacctctgtttgtattttggtgttaattttattttgaagcatccgtgcctggttggccatatgcgtccaatttttcacatattcagctgtttgaatagagctgtgcagtgctactgaggacactacaatagaggttattagtgtaactagggagactgtaccaaaaattaccatgcctaaggctctacaagcacagtgagtgagctgagtaagaaggagttgtacaaaatataaagccgggatagccacccaaggctcaaacaaattgacaggaatccataatctgggaatgcaacccggaattattaaggtggatatgttgtgtgtttgtatcgtgctatgatttatgcagtgatacagttgacaggagtcacaagtcaaatgggagacgtttacctggagttggtcctttttagccgccagaaagatacagggattaaaaacacaaattgtaaattgagtgataatatttcttacaaaggtaacattaaaactgtgttgagtcctattactattattggatagtgtcctgacccagatgctgccattcataaatgggagtgctaacttccatatcgactgctgaattgggcccctctttccttgatgacgccgctgaggcaaaggcggactaaagcctgttccgtgccaagccagttgcgtggcagattaggattgaatcccaatgcgatatagcgaagaaatgttaaatgttcaccaccagtggcagcgaagtttgttccatgaggtctgattctcatctctcccaaatgaccacagggaccccagtcaataatgtctcccattaacatagacttgtctagctaaggggtcaagacactggatccaaggaggggggtgagaattattgaagggagcccattctgtataatcaatacaatttggacgatggggctgggagagattagtaaatccaccagtaatattattagagctaaggcctaataggtacataatgtttccatggtgactcaaccatgcctgggattggactgcaaggcaactgccattgagcgatgtatccttggtgatgcataaagggagtccctccaatggggcagtgtaattgatactattgttctgacagtctaatagttctgtgtcagggggagttaggggtcctggggtccatgctccctgatcacgatatacctcaggaggagtgtcactccagagtacaggtcgcactactcaggggttaggaacatatgcccgacatgtttttgcttctacacaggggaaacataccacacaggacactacagctagtatggccaagaacattgattcaggggtttttgcctgaccctggcactccagcattttctcagcttcctgcatggttttcttgatctgtccccatgttatgagggtggatgtcaatgtgactccagtcggcccttgttccatctttgcattcagattcaactggcctatggcttgtactgggggaaccgggcccatggttgcgatccacggatccctccagtctcccgttccatggttgcacgtacctggagggcacctacacagtttgtccatctcctgtaaaaacacaagcataccctcatccccacatcagcaaatccactgggcctttcctttgtccttcttctggggatttccataacacctttggataaacttgcctctttccctctaacacttgccaatgttgttctgctagagtcttaccatccataccaggcatcaaaaaatttaaagtaaacaagactaaatgtaattttgtttaaggtggtagctggtctcctattccccctttttttctcaacatacgctgtagtgtttgatgtgcccgctctataatgccttgtccttggggattgtaaggaattcctgttttatgaatgattgcccataactgtaaaaaattttgaaaagcatgactaacataagcaggtccattgtcagtttttaattgtttagagacccccatatgggcaaatgacgacaaacaatgccattggacatggccagcagtttcccctgtttgacatgtggcatgtaacatattggagtaggtgtctatagtcacatgaacatagctaagtttgccaaaggctgctgtatgtgcaacatccatctgccagatttcatttggagccaagcctcgtgggtcgcatccttccacgggtgcaacaccagggacatgctgacaagtggagcaggcttgcacaatagcttgagcttgactgcaaggcagatgaaacatatgagtaagggcagaggtgttttgatgcagtaatgcatgggaagcttgggcttgttggaatacagaaccaattaatttatctgctttatcattaccttgagatagtggtccaggaagttgcgtatgagagcgaataggagcagcacaagagagaatagcttgctgaagtcttagaaacaaattaagcagctctggttctagggtgcccttaatagtggcagtctcaatgcaactagctgcatttacaacataggctgaatcacaaacaatattaataggagataaagccgtgagctctaaaacctgaataactgcgattaactctgagcattgagctgaaactccagagatctttattgtttgagtatgtttagttgcataaatagctgtgcggcctttgtaagagccattggtaaaatatgtctttccacctggaatgggcttgtgatgggtaattacagggaggataaaagggtgaactttataaaattgcaaaatcttgtctgatggataatggttatctattattcccacaaaatctgcaaaagcaatttgccatgcagtcgacatttcccatgctgcggcctgttgttgggaatccaagggaacaataattttatcaggatcatatcccgtaagcattttttacctgtgcctacctattgttataagttgagtaattaaagaaagataaacttgcaaagatttcactgtcagattgaataaaaaaaaaaaaagcctttatattaccattacagatttgtctatgaattggcctaaaaatcctgatggagaatggggggtaggaagaataaacaaaagcaaaggcttttgtggctgtagccgggaggcatgttgttgctgaaggatctgttctacacgctgtcactcagcttctgcctcgttagtaagttgccgaggagaatctaatgaagaatctctttggagggtttgataaaggtgtgtgagttggtagatggcaatacctagcatcaggcacagccaattgatatcccctaataattgttggaagtcattcagagtttgtaccctctccctacagagagttactttctgaggccgaacacttcttccagtaacaatagtacctaagtactggtatggggaggttgtttgcaccttttcaggagctattttgagattccatgcagtcaagactcattttatttccctgaataactgatgtaacatttgatctgtaggagcggccaaaagaatatcatccatataatgaatgatgtaggcattgggaaatatattgcgaggctcctttaaagcttttcctacaaaatgctgacataacataggactgttgagcatgccttgggctaaaactttccactgagagcgagagacaggctctctttgattaatagaaggcacagagaaggcaaattgaggcttatcctttttgtgtaatggtatattaaaaaaaaaactctttaagacctattactacaagagtccaatctcttggaatggctgctgaggatgacagaccttgctgtaatgcacccactggtttaatctgtgcatttaatagctctcaaatcatgtagcagttgccattttcctgacatttttggatcacaaatacaggtgaattccaggggctgactattctgtatgttctgcttccagttgctctctcactagctgatggagttgcatcagtttctcctgtgataggggccattgatccacccacacaggtttgtcagtcagccactctagcggcaaagcagtgggtggaggagaaataccaatgacccccaccaaaaatcctgatgacctagcccttttctgttttgtccagttattgatattggatcagggtttccctgcaggggctttcctaagccttttccactctgaatcccattttctttaacattttaaatcctggattatcaatagtttcctttttaagtctcatgtcccatgctgtcagtaaatctcggccccatagattaacagctatatttgcaacataaggttgaaaagtacatgactgtccatgtggtctgagacaggataaaatctcagcactccactgaacactttgagctttcctagtcccactaaggatgtagaagttaattgcaggggtcaagatggtgggccaatagtgtttggatattactaacacatcagctcccgtatccataagcccatagaacttctttcctttaatttgcactgtacaggtgggtcgattaaatgctatgggttgtgatagataaatttaccgcctagttgtacttccaaatccttgattccctcgtttttcctttcatggggaagggtgcaacttgcagggaataagcaatagttgagcagtatattctcccagttcaaaaacccaaagatcttgtgacattactactacttgaatttctccttcataatcacagtgaacaactccggggaccatggtaatgccctgtaagttaagacggcttttgcccaaaattaatcccatatatcctgttggcaaaggtccccaaataccagtgggaatcttcgtgggtttgtctcctccaacaaatgtaacccgttctctgactggaagatctaatcctgtgcttctgggtgttcctggggagagggaatcaatgttcttctgggaacccatccctgaaatggggctgtggcctggatggggaatgccctcattgtttgaggggcccggatccaggcccccttctcgtttcccgacaggggggtgctattctgatgaaattttgagcggcattgattaacccaatgatttcctttattacaacgagtgaaaagtcctggcattttttctgtctgggggaactgcattataagatcctctctgcccagaggtctgatggcattcttttttgaaatgtccaatttttccacaattataacattttcctactttagggcttgacccttggccctttctagatttgttactactaaattagccattgcttgagccaacattgtagaatgatggagttcagttcccacatcctgacaggctttgagaaattttcctaagatctttgcagacctcacaggtgccagagcacgtttacaatctgcacttgcattttcaaaagctagagtcaaagtaagcatttctgcagcagcggtatgaggaatctgatgcctcactgcctcttgtaattgtacaacaaaatgtgcataggactcctgcgacccttgcataacttgtagaaaagattgtactgggactccttgctctggaatggtgtcccaggcgcgtttagcagccaaggcagactgcttgtaagcagtgcctgggagtgtcaattgtcgcagcagatctgaataagggccattacccagttgcatatcctctgtaatgtccccgtgtccagcagcacgattctgtctagtctggtctgcacacagttctagccagtttaaattccatgtcagatatgcactaccagacaaacaagtgtgagccaaatgctttatatcaaaggctggaaggcacatagcaccgagtacagattctagcaatcctaaagtaaatgggctctgtattccattattaactacactagcttttaattccttcaacaacttaaactctaccggggtgtgttcataagtaaactgctgtggattattcagattgggccttacggaaataggaaaagcgcaaggtcctaggggctctccagctatggcagcagcgcagagaattctttgtgttggggtctctttctgctactgaaggaggcggtatagatgtttctgctattggggggatggtacaggccaattttcgtcctttcctgtttatcattttcttttcttttcttttttttttttttttgagacagagtctcgctctgtcacccaggttggagtgcagtggcacgatctcagctcactgcaagctccgcctcccgggttcacgccattctcctgcctcagcctcccaagtagctgggactacaggcacccaccaccacgcctggctaatttccttgcatttttagtagagatggggtttcactgtgttagccaggatggtctcaaatctcctgacctcacgatgcgcccacctcggcctcccaaagtactgggattacaggcgtgagccactgtgcctggcctcctgtttatcattttcaatgcatgctgtgggtgagacaaaagattctttcaatttttgagattcagaacatggctcctgtggtccagcagaataagaaggggacaatggcagaaggacagtacagactaaaccccagagaaaacagaaggatcaactttgagacctttttgatgagcccgttttaatctgtctcctactgggtcccaattttccacattgagggtgcctgtctgtggaaaccatgggttatgcataataaactcctgcagaagcttagttagtgtttgagagctaacctgagcattaagcaactgcacataatgttgctcctccatagacaaattctgccccatgttaccctgattcagaaacttcccgctcccagtacctcctcagggcactgactttatatcctcctctggctgactcgtcctggggttcctcgttcatctgatcagtttcactttctctgctccagcagaccttcttcattcaagtctctgtttgggtgccattgtggctgttactgtaggactaaacgaaggaggacaaatgcagaaatgaagacaaagacaaaagaatttgtttaaaagaaggggtcagagggctccttgcttctagagaacaagggccctgagcttctacagcccttcatatttattacgtggagtgaacagggaggaaggggtaactgttggtcagctacttgatttatcacaggctcacatgattgctttctttgttcaacagactccagatgttcctatagataaccttaaggaacacggtgcctgggacgtggttgccctcagcattccttctggtgacagatgcagttgtcagtttgccaacatcctgctttcatgagaacagtttgctgtttgctcatataccctccagtggtatattgagttggtcacgtccctcattcctttggcctccaacaggtgaaggctaaagaaggctttctcatccaacgtcttcactgaggataggaaagccctttctctccaattgtgaactgcacgcatgtgtgtaagctatgcttgcatagcaaagtccacttgggcattagagtcaaagttgttaaggggagctagtcatagctaccacgtggccaggcatgtggaaccagacaccaggcacacatcatgaatcatcatatttactttaaataatgctgacaacctagttcatagtgacacactacttgagatatatagaataacattattacccagtaagtatgtgaacattccgatattttagtaagggtcatcaccatggcacttatctacagagataaatgaaaactaaaacagggttgctgcattaattttgccctggcaattgtctgattctgaaatggtggcaggttttgagccaaaacttgaatgagtaagaacttgccatatagccgagaagagcactctagcaaaaagaaataaatataaggaagcataatagttaaaggtttttaaggaactacaaataattcagtgtgatgaagtatggaggtgaggtcatgtgagggagagggatttggagagaaaagtggctgtgttccgatcacctcctgtgcacctgttgaaagacaataaattctcctgccctaaatagtaagaaggctggacacatgacctcaacactgaataaatgagactggcagaaatttattagtcatatgtactcacagcctggaaaaaagagggcactgcataccgtgcaaggccacagaaggtttgcactcaggaacagaatgaaccattaggggctgtgagaggtaggctttgtagtcatcagagggttgggtgactcctggttccctccagagaatgtagttggcttgctttaacagttttagggactggcagtgagacgaaacccattaggttgaggcctgagtgagatgcagctggtctgtcagataagggaactggacaagtagggaacctttcctgcttgtgggagtcatagctatcaagacaggggaatttgtggataagcatttttggggagctctgtgagggtcaaaaatctcaaggcagcagttgaaattttaggtcttacaatacctaaaattggtttggagttatggcagaacaaaaagggaaagaacaggtcataagggcgtgagtatacaaggcaaacacttggattttatttttcagtgggcaataggaaaccactgaccaattgtgagcaaagaatattattccagttctcttctgagaaaaaaaagtctctgtcccattccaggaggtgcagcaatcaatcaatcaatcaataaggggggaaataaaggaaaaaagtctttagagttttcatgtttatgatctggtccttgattggtttatttttcagcaagtcacttcttttctaacttgggaaagggaaagtttgggactgtatatatttatttaaatctgaccactccacactagtcatctccacttgaatgttcaatacacaacttgaagtaaatgctgaaacagattctagatccccaccacacacatacacactccactctcaaaatgctctttctgaagtcattcctgtctcagtaaatgcaaactgtgttgttacagcaaaagaaactggagatatatatgacttttctatttatttcacaccaatttaatcacaaaccctttaaaacatacccagaattcaaccactccttgatacttctacaaacactacccataatggtttatgggtcatccagatattataatagcctttcaatcaatcttctccaggaaggagaaagagagagcaacaaagatttttgcagaatagaagaatattgttaaataattatcacattggccgggcgtggtggctcacgcctgtaatcccagtactttgagaggtcaaggtgggaggatcagctcaggtcaggagttcgagaccaacctggccaacatagtgaaaccccgtctctactaaaaatacaaaaattagccaggcattggtggtgggcgcctgtaatcccagctacttgggaggctgaggcaggagaatcgcttgaacctggaaggcagaggtttcggtgagctgagatggtgccactgcactccagcctaggccacagagtgagactctgtctcaaaaataataataataataataataataataataataattctcacattgaagatgattgcagaattcgaaaataaatgagaaattcggcatatttttattgagctcctactatttgtcagatgttattctatggatagggaaagaaagactatgtaaaaggcccaatttctatgcaccagaagccgctatatttgctaaccaagagaaaccaagacttatcacaaatgagccaggagagccattattcccagtatctggggtttaggaaaattaaggaaatgtcttatatgtaggctgttgacattatcttcaaatgaagtacttgacttcacagagattcactgacaggcttgaaagaagccacacaaaatagaactttatatgccatgatggggccaagagcgctacggaacattataaattctataaatatcttctccatagtatgatgctaatgcattacattttcgtgttgattcatctattaaatgtaaaaattgttaataataaaaatttttgcatttctatttcgtgttccttcacttcttaatatatgggaacctcaaaaactggtaatggctctagtccgctcggcactcctgagaaaccccaaggaaagtattttctttcctttctaaacagaaccataccacgaaaagtgctctgatatcacattatcacaatcagagaaagtaccagaacagcatggagagggggtaattgtctccggggtctgcagatatccatgcaggatggcgagaaagaccacggtacagatgttgccttgtggtaaaactgccttccaggtacagttttcttaacaactatctgggcagaccctgcaagaacctagtctgtaaatggtgaatgtggatgagcatcatagggaagaaaccttgagtaagcttattttaacatatccttcgatgcagacaatatgcagaattttagcatcttttagatgccataaactccgcttcttctgccttgggagtcagaacaaacgacttttctctccaaggagtagttatattaccacaagactaaaataattgtcgataccaaccgtttataaatcccgattctgtggccccaaatatcccacctaatctaaagttttcattttctcattggcgaaaacacgggcgctgtagatgccaacacggggggttggagggggcgggtggggggaagctcgttttattttctaagtattgcagcaacaacggaactgcgggggaccacgtggcctaatggataaggcgtctgacttcggatcagaagattgagggttcgaatcccttcgtggttaagtggggttcgttttcgggcatgaaaattttattacccatttcattccaagaaaaaaataaatcatacactctctgggttttctgaatcctttttttcttccatctcctctcctttaaagggaagaaggagacattctcaaaggccttaggagaacaagtgacagagtgaagaaagactggaaagtcaaaactgaaatacagccatctactactttggagctgtcaggttctccccaagtttggattttaagcacctgcgtttcggttttgtaggcttagattcaattcaaggattcaattccttgaaaaaaagaaattcagatctataagccaagctgtctcaaactgtagcgtctcagactaatgccaggccccagtggctagcacagtaggaaacctgttgcttcttctgatttagcactaggccaaaaactcttcacatttcttttttagtctacatccgcgtgtaccaaggagttttggcagctgctgaagcctatgttactagttcttactctccattttaacttttttgttgtgggtgtgttgccatcaaaaggatgagaatacctaatattgaattttatattgcaaagcaaaaatataaaggtaattaaaatagtccaactggttacagtgtgtgtgtgcaaacaggaaaagacagggaacacagctgtgcaaaatatataaaaaacattttgtattcctaaataacattttgtgtgcctgaatttaataataatttaggattaaggaaaagtaatttccaattgctgacatcatgatgaaacataagacatttgactccatccagatgagatcattgattcaaatcacatggagtccataagtgtgtttctagatcaaagcaaagaatattaaaattagtaataattacctctccctgtccccagcttcttccatagctctgtttgattctggtttcctctagtcatctgtagattccaagttgtataaaaaatgtggggattgagcattggtttccagactttgaaatttattggattagaaagtgtcaatgtcctaatgtcatgcaaaaccatgttctgccttgttaatggcaaaacccaccatttgcactgagcatccttttataaactagaaaaaggatataacctcaaaagaagagtaaccttttaaaatgaatacagtgatacttgagaattacatagcccaccttttttcttgattctaagaacaggaaaaagcttcctcctctctctctgatcagtatgtaaccctgtgtaccagaggatgaacaagactttttccaggggccccacagcctccctcaagcatttaatgaaagtggaaattctgatgcaagaatataaaaatttgcctgtcataaccctttctctcttctttttctttctttctctactgcactgatagcaaagaatgccaaaaggaggagagagactttccagactgggaagtgccaaaagggagaaaactgaaaaagatagggaaatctgtggacatcctgagtcttaaatggtcaccgtgatttaggaacttgtcccaaatccaccaaataaaaatatatgcaccctttgatgaatgtgtaagcctttctgctttgagagtgggattcagaaaataaataaataaataacatgaaaaacatcttttggagctggattaaaaaaaagcaactggaagaaaataaatcaagaagaaagatttctagatgtgtatcacaaacactgggagttgggtccagttgcacaggggattaagagattcatgaatttaatagagtagccccccttatttacaggagttatgttccaagaccccagtggatgcctgaaaccttggatagtgctgaactctatatacaccatgttttttcctatacatacacacatatgataaagtttaatttataaattaggcattttaagagattaacaacaataactaataaaacaattataacaatctacatacagtaataaaagttatatgaatgtgatctctctgtctctcaaaatactttattgtacattactcacctattttcagacctcagttgactatgggtaactgaaaccacacaaagtgaaacctcagatagaaaggggactactgtaaatgtttatggagcacctaccctgtgcctgcttctctccccagccactgtgctaggtactgggattctagaatataggatctagcaatctaggaacacagtaacaaaagtacacaaaaacccatgtcctcaagaggtttggagttgaaggaagagaggaggagacaacacagaaaacacaaaatgaataagtagattatataagtaaattatactttatattagaagagatatattctgaaggagttaaaaactatgcccctctggcatagtgactattttgagttaaaggcacttgaaaaatagcagatgcaagaatatcactctgactctcattctgtttcttaaaagcagaatattaaattcctctgtgaaataagtcctccctaaactagaatgacagtatcattcattctagtttctaaggtaactgaggctgagggaaatctgtgtaaacaaatcttgttaaatgagaatttatcctctcagccacttctctacccaagtaactacccaagcccaagcccctttgccttgttacatttacatagtttaccactttctgtctaattcagcatgtaagtgttccactctcactgcactgtagtatcttcattttccaatgaagcctcttgtgccacagaaaactattaaatgaatttgtatggtctttttgtattaatctgccttacatcaatttaattctcaggttcagctggagaaattgtagtaagaatagaggtaaaattttgcctccactacagttcaaaaacataaagattatattatatatttttaagacatagggtctcactttgtcacccaggctggaatgcagtggtgtaatcatggctcactgcagcctcaaccaccaatcctcctgcctcagcctcccaagtaactagaactacaggtgtgtgccaccacatctagctgatttattttttgtagagacagggtctcgctatgttgctcaggcttatcttgaactcttggcctcaagcaatcctcctgcctcaattcccaaagtactgggttacagatgtgagccaccatgcccagccaaaaccataaagatttttattatgacttgcaaggagcaaagactatgtgtttcagtcagctattgctccattaaaacacacacacacacacacacacacacacaaatgcttaaaaacatacaataagcatctgtgtgtgtcagttgaaggtcaatagttctaggccaaattatatgaatggctgtaccttaagatgtaagtacacttcagcttacctgctttgcgcttcacagtaggaactctagttagttcaaagcatgttctttctggggccaagggtgaaaagacagcagctacccaagggaaaatttttctcatgaagatggcagaggtgcatatggacacccaactatgcaggcatattcaaaggccctaattgactcatgcctgctaactacacattgaccaaagtcattgtcatgcccaaggccaaagtcaaagtgatatggaaatataccacatgtctttgggaggaattgcagagttgttaggcaaagggcttagatatggaaagaaatgaagaatttaccaaaacttacaaattaacctatatcttgaggaagagaaaaacagccccagtagccagaacattaacagctaggacttggagttgctgggagctggcctggctctcacagcaaagctctggtcaactcctattggatataaccaatctcaaaaaacaccaacaggcaaggacactttgtggccattatgacttgagataaaacaacacaattcataatcatggtgagtaaaaataaaaaacaaggacatcgtcaaataacaaaagtaaccaaacatctcctcctttctggctaatatgtctactgcttctttaccagttatagtgagaatcctgctttatcctcttggtttgtttgtttgtttgtttttgagacagaatctcactctgtcacccaggccagagtgcagtgacacaatcgagagtcactgcaacttccttgattcaagcgatctaggctcacccacctcctaggttcaagcaattcttgtgcctcagcctcctgagtagctggaattacaggcatgtgccaccaaaacccagctaatttttgtatttttagtagagacggagtttcaccatgcaggctcaaaccctgacctcatgtgtctgcccgcctctgcctcccaaagtgctgggattacaggcatgagccaccacacccagcctattctctcactttctagataaaaattattaggatatacaatcacaaaattacggtcagctaatggttcaccatggcattttgtctccctctttgcaacaaaccaacaaatccaattttgcttgtctacaggtgtgtctctggtggtctttgtcaggaatttaccaacagtcttgaattctgaaacattaaacatcacagacatagaggcagctaacttttatgtaacacctcccctttgtccaccactaaaccagattaaggggagatgtgttaaacgtggaagacaacagagcctctgataaaccacatgaataaaaaaaaaaaaagaaagatttttttttaagttgaaaagttttgcatggcataagcataaccaatttttcatgttttttgtttagatatgggatgtttagatatgggccaaatggcagtttcaaatatttatttagcaagtttagcagtcttttttgtgtgtgatttttatataacataaattttaatggtcctgtgggcttcattatttaggaatgacatagcatatgtaaccaattccttttttctttctttctctctctctcttttgtttttgtttttgtttttgtttttgttttaatgcggggaggttggggttgtgggggggtggcggtcttgatatattgctcaggttggtctcgaactcctggactcaagtgatcctccagtctcaaccttccaaagtgcaaggattgcaggcgtgtgccactgcgccaggcccaattccttatgattacacattcatgatgaaaactgccgaaacagcgaaaccaaaactaagaaggaagtgaggacagtgatggttcttaacccgggagacccaaggcacttgcaaaacgaccactagactccacccctctaaagatttcgatttaactggttctaggggagaggaggagacacgagcattttgagaaatctccccagttatgtataattaacaaccaccggatcacagctagataaggagaaatgctaggcgctactcagggggttaagcaaaaaatcagagggtcggaaatcagttttcaactacaagagtcttgcggatctggagcagcggtggatacacctctgcctgcgcggagggagcggagctaaaatactgtaatttttcggacctttataaaatagaatcagtaatcatgttaccaacagaaggttgttagtgccagcacacgttagtgtgctaatacatactgaagaatacctctcttaaagggagctaaaaacacctaattctcagtgagcaaacggggaggtatagcagacgataccttactgaggggaaacctttaaaaaagcccagttagcagggaaagccgagcgacgaggatgggattcgaacccacgcgtgcagagcacaatggattagcagtccatcgccttaaccactcggccaggcctctcctgatatgtgtaatgtttctcttctcaacagtttcatttggcaattcctattcttttgttaaatgttttcagtgacggaaataatggataaatggccctcttactctcataaaggaagaaaaactaaagaggagactgggagggaggaatagaccctaataaagatgacaaagtacactttctaagggaaaaataagagaaattaaaaaggaaaaacgaattagtgactgctcctgttttttaaatcaaattggattttgtcttttttcttaggtcatgtatatgaacaccatcattaaaccaggtatgtctgttgttgcattcctggacactccctggtaggattcccagagggatgcctgccatatgatggcactaacgcatctgagaaataaccattgtctctcctagaagcccaagtgggtgactggtaaagtgttgaagtgatgggttacagtcaaattgtgattggttctgagtgtcagaccctagagtttggactgtatcttaaagaatcgtggggccatctgagggatttttgttttgtttttgcttattttgcacaaagaaatgtgatgaaaatgatacttagtgttgtcatttttattatctgtttgtatttcatttaaattctaaattaaaaaaataaatttatttttatagagacagggtctcactatgtcactctgttgcacaggctagcctcaaactcctaggctcaagcaatccacccaccttggtttacccaaagtactgggattacaggcatgagccaccatgtccaacctttctttggttgtttctgactcatttcatcacaatcagagaagtcagtctgatgctaatgttctgtgaaattaggcaaaacagaagaaccccatgacttagcagtgactgcctggccgattcctgacaatatgcaggcctagtgaatacggtcagaccagttcctggataccaggggctgttttctcacctatacccaataaaattacaaaaacaataatattgtgtatgtgtgtgttttgacatgatgtagcattaaaaaaataaggccgggcacagtggctcacacctgtaatcccagcactttgggaggccaaggctggaggatcgcttaggcaacatgacgaaaccccgactccacaaaatatacaaaaaattaaccgagtgtggtggctggtgcctgtagtcccagctacttggaaggctgtgttgagaggatcagctgagcctgggagggcgaggctgcatcaagccataatcacactactgcactccagcctgggtaacagagtgacagagtaagaccctgtctcaaaagcaaagcaaagcaaagcaaagcaattaagaatatgatcaagattcaaactgtatcccctagggagttaccaaggaattacctaacaaatatcagacatattaggtatcaaatcaccatcaaaacatagcaggccaggaaatgtacgaattttcatttttttaaagcttcagttagcaacaaattctaaagtgttctgaaaagaaaaactattgcttggtcttgattgtgtttggattagaaattataaagcatgataaacaaacctggacctgaagggttcattagttctttgattcattcaatgttttgatgaatatttattgagcattgcgtatgttccaggcattgttctaagaacaaatgtatatgccacacacaaaattccctgccctggtgaaacctaattatgtagaaataagcaataaacaacttataaagcaaaatataggccaagcacagtggctcacacctataatcatagcactttggaaagccaaggcaggcagattccttgaactcaggagtttgagaccagcctaggcaacatggtgaaacctcatctctacaaaaaataccaaaattagctgggcgtggcggtgcacatctgtagtcccagctactcaggaggctgaggagggaggatcgcttgaacccaggaggtcgaagttcagtgagccaagattgcaccactgcactccagcctggatggcaaagtgagaccttgtctcaccaaaaaaaaaaaagcaaaatacacagtatgtcagaggatggtatatgcataggagtggtggcaagttaaatagggtggtcaggggaaaattagctcagtggttttccatgctgcacatttgaatccatagggaacttttgagaaggattcatgtcagggcattatccctatagattctaattcacttgttcagtcatgatattaaaagagagtagcagtcaagctcttcaatactggcttgatcataaaggaagatacacaatggaaaactagttttaaaaaggtgaggcaagagataattttcccaatccaaaaggtaccaggaattgctcccaatacagcacttcctgaccaagcaaaagaaggtgtctgcaaaatatcagtcatagcattagaccagctccaattagggcttattctgccctgaggtctttacagtgtttaacagtgtggtggccacacttcctgtgtaaactcctccctttgaatgttggctggatctagtgacctgctcctaacctacagaatataaaaaatgtgataggatattactttcatgatatctcatgtgagatatgtgtctgttgttttaagctgccaatttgggtgcaatttgttatacaacagataactaatacatgcaggaaggcctgatcagccagagagcagtggatcctatggctgaaagggagtatagttgagaatgtaaaaatacaagacatcattgccataaatttgccaagtctgagttcagatgctaatcattacatcatagaccctttccataagattctcctattgaaagacttgtgtataagcttggtgtaaatctatacattatcttttttaaaaaagccatgaccaatagattaaatctaaagagcattaacaaatgcctgctatttattaataaagggtatggtaggctaaataatgacccccaaaataggtccacaaccaatcaccagaacctgtgaataagttaccttatgttaccttaagtggtcaaaggaattttgcagatgggatttcattgaagattttgagatggggagattatcttggattatctaagtgggtccaatgtaatcaagagggtcctataaaaggaaggcaggaggttcagagtcaggaaaagaaaatgtgactacagaagcaagaagtgatgcaaggaaggggccactagaagctgaaaacgccaggaaaatgaattatctcatgatgtctccagaagatacacagccctgctaatacttttattgtagacttctgatatccaaaactgcaaaaaaacatttaattcacgttgtcttagccagggatggtggtgtgcacctgcagtcctagctacttgggaggctgacagggaacgattacttgaacccaggagtttgaggctgcaatgagctatgattgtgccactacagtccagcctgagtgatagtgtaagaccctattttaaaaaataaataggccggatgcggtggctcacgcctgtaaccccagcactttgggaggttgaggcggtcagatcaaggtcaggaggtcgagacaagcctggccaacatagtgaaaccccgtccctactaaaagtacaaaaaattagccgggctttgtggcgggtgcctgtaatcccagctactcaggaggctgaggcaggagaatgtcttgaacccgggaggtggaggttgcagtgagatgagattgtgccattgcactccagcctgggcgacagagcaagactctgtctcaaaaacaaataaataaataacaaaaaataaattcatattgtcttaaaccaccaaatttgtggtaagcaataggaagctaataaaaagccactaagatagtaccatgaatagggctaaacaggcagaaagaagtctacagggcttttttctggaacaatttttagaggccagaggagttcatggagctcacttttgttgtcattgagagccctggaggatatgttttgaactgtagagagagtcaacagaaggaatttagagtcccaccaacagttgggatttctgtatttggagtccagagtgttaaccgttataccatggtatctttgtataacaaaggttctagggaagacttgtatactattgcatctggtcagttaacctttaaaatgggcatagattcaatgtaaggaacactaatagcttctcatagggagaaaaatgcaggttctcagatgactcaatttgtggtttgcacatattcatgcccgagtccagagatagcatagagagcattcggagtgagctctgaagaagaaaaaagtcataggtggggcctctgacacatgaacctttactcatcccagcagatgattaacttacagtggtctaactgacttcaggctccagcaaagcaaagcaaagctttcaaaagaagagcttctaggatacatgagggtgatgggcagtggacaactttcagtagccagagaaaagagcaagaagcgggatgttgctccagaaaagaagtgcaaatatgtgagactatctatacatgcccaagtgtgcttctccatttgggtaaactcaagagcaaggtcaccaaaactgagacaggtccactgaaatttgaagcctaggtgctagccattaagtcaccaggacatggaaattgaatccctactgaaagactgatgtgtacttttaacataccagctaatctttcaaataatgtggacaatgcattagcttaaggagtttggatggcgccccaactgagtacaaacggcagaggctctaagatgtgtacaactgcagtgctgtgcagtccaaacattttaaggacagtgttagtgcttagaagcagatgggacgctttaaataggctctagaaaaggaagaaactgagattgggggctgtaaaacaaactcttaatcactggggccaagattctaacttaccagaatctgagaaactctgggcaaaaaggcaaaaagagacatcaagtaaaataggagtagggctaaaatttcagaggtcagtagatagagacagttttctctaggacagagtgccatgatgattggcagcgcttgcagccaagtgggtacacctcgaaggtgggctaatgatttaagagaaccacagaggaacattgaccaagatgttgctaaaatcccaaagagatttggactcaaattcctggattcagcatcccgagtgctaaccgatatactatgggacccttacatggggcacttgctactataattcttatgtaaatccttgcattttgaggggcttccaaagaagaaaacattcgcgggagggacctctgacacataaaccattaagcaccctgagcactcaaataacaccctggctgcctttgggaactcagggaagtgtggatgctaagagaaaagaccaagaatgtacaaggacatgatactactcagaagctagaaatgacagtcaggagttacatgacacttgctaatccgaagaagaaaccgtgaatgagaaagtaaatccacagatcgctgtgtgttgatgatttaagagacgaacgaaggatgggtcacaaaaagcaggacaggtcccaccgagatttgaactcggatcgctggattcaaagtccagagtgctaaccattacaccatggggccgccttccgccaccaatttcatgaatttataaaaatactgattacagagcatgtctattcgatgcagtattctcttaatatttattaaattaatactatctgcatcccatgtagcagaagctccaagagactcacatgcactacaaacctatctggaccaagtccgtcttagaaactgaaaaaacttgaacccgtttgagtattgttcaaaaaaggaaagaactgaggtctggtaggtgaaagacgtatccttaaacttgcgtatgataatttaaatccgaggaactcgcatccaacaagagaggaggggcaagagagaacagatgtgaaattccaggtgaaagattagaggatgctgttctgcaggaaagcatcgtgctgccgactgggatgggatgttaaggtgcttaagtgatcaggtgtacgctcctctgggtacaatggtaatttgagagaaagaaagagcactaaaagtttggtaggtcccaccgagatttgaactcggatcgctggattcaaagtccagagtgctaaccattacaccatggggccaacaacacagtaatctcctgacatatttttgataacatgaatgtagtacgtggaattggtctattgagagtgctgtttactttggcctctcaaaataggtgcatagtcccagattccgagaaagtaacaaaactgctccagcaggcagaaagcaagaacagaactcacctttccaaaaacttgttctgatctgcccacggagattatgaataggagcgttccttgattaatcagaacttcgcatttgctgaaattttaggtcacgatacttttttctacgtaagggtttataaaagaaaatatcaacacttagacatctcttaaaacatcttagcaacagttttggagattctctatctggtgtttcctctgcaattccggcctctgaaagtaggatgacacgaggggaaccagaaaggatctgtttgagatatttattccataagttaaaggcaagcacggttttggaagtcagacgtgagctggatttcagatagggagacagcatttcaagaagactgaaaggcaaaacaacttgagcgtttttccatcatttttatagcagtgtcagaaattacttgtgttttcaagtgctttccaatgtaacacttcaaaaaatctctaagtcttgttacacaaaagaactaaaattatctggttccacttttatggagaaagataataacaggaaaataaaaagtactactccatgttattctgtgtgattgcacaggtagtgcaccggatttcctctacccgagagtaaaaaaagcacgccgtagtcggcaggattcgaacctgcgcggggagaccccaatggatttcaagtccatcgccttaaccactcggccacgactacgtacctccttcaacaacctggatatattcccatgaggaatatatgtttcttttcacagacatctttaaatttgtttattttgacaaggtaacaactctggaatgtctctcatcctggttaaaaaacaaaatcaaaattttaaagatttagatattggctaaaagagatattgcaaattgcaagacttgtctgatgtaggaagtacgaaagactttacgagggggccacacgccaacccctaaatggtctccaaacctacgaaactggctgaaagctctccacacctaattagtaggattacagatattgaagcctacaaatgcgcatttccaccaggataccttgtggattcttacacgggtcaggtccgctgacgtttagcacgcctactttaaaacctcttttctgtagggtcctagtcttcaagtaaaatatatgcggccatatagcagaggatggtttcgatccatcgacctctgggttatgggcccagcacgcttccgctgcgccactctgctgtctcgacagtccgctccgccactctgctgtttcaacattactcttgtcaagtatgtattagaggctacaattttcggcatcttcctaattttaaatgatttgttgtcgtttgccaaattatcctggagaatgagaagtgcacactggccatccatatggggctgcacgccacttccaaacaccagcggtttagaattcttcctcgataaattcgaatcagctgaggttgaagttctctaaaacggaagcatgtttcgagttatgggaaaacaaagtgcaggctaattggcataatttataaaggtgaaattataaatgcttgggcaaatttcagccattcctggataccggagggagtcgttattacttccaaacattttttacttgagattttcatcgaaaatgttcacaggaaaaaaaaaattacagttgcagcgaggaggcaacagaacctagaactccgcgcggcaggtgagaattcaaccacttaaccaccggtgctaaacgtagttacatggatttgttttcttttacatctatcatcatatctcccttaaaaaaagtgacaatgtatgttctctgtctataatgttttaaaaatccagtcaaatattatgtctaaatattctgagtaaacgtttgaacatagaagtaagtaaatacgtaagaatatttttcagaacgtttgaacgtagaagtaagcagaaagtctgctgatacgtgacccttggagactttcaaagtgaaaaagacactcaagcctgtaatcccagcattttgggaggccgaggcgggtggatagcttgaagtcaggggttcgagaccagcctggccaacagggtgacaccctgtctctactaaaaatacaaaaattagccgggcgtggtggcacgcgcctgtaatcccagctactcgggaggctgaggcacaagaatcacttgaacccgggaggagaaggttgcagtgagccgagatggcccatcaaatgcactccagcctgggtgacaaaggtgggaggagaggggagggaagggaagggagaaaatttgagtttcaggaaggaaattaagctcattcacttggctgttaactggaagcctcagttatggctttttttttttttttttttgacggagtctcgctctgtcgcccagactggagtgcagtggcgcgatctctgtttactgcaacctctgcctcccgggttcaagcaattctcctgccttagcctcctgagtagctggaattacaggcgcccaccaccacgcctggctaattttttgtatttttagtagacacggggtttcaccatgttggcctgacctcagatgatccacacgcctcggcctcccaaagtgctgggattacaggcgtgagccaccgcgcctggccatggccttctattaagaagttaatatgtgtttcaagaacttcctggaataaacaatagggtcctagaataaataaaatttatttgcaactttagcttcctgggcaaaggtctctgggaatggtaaaggtatgttgatgaaaatagtggaatagtaaagtcatgttaatatagacagtaaattgggctgtggctcatacctgtaatcccagcagtttgggaggccgaggcaggaggatcccttgaggccaggaggatcctctgaggccaggagttcaagatcagctgatgaattgcccaaggttatttttaaaaggtgacttctacgtgttaactctgcatcgtgttgcaaaaactcaacaattacagttgaactatccagtgcatctttcctgatacagagtaatctaagttttatctgtcatatatgaaaacaaacaaaactacgtctacctagtttgtagatcagtatataggttcttttctctgtcctctcactcttttttaaaatcatagataactcttataatagtccaaaatcctgctttggtgtagatagtctgtgatttcccccctaaatcccacattctgcactcttggcactcacattatccagtcagaggccatcactcttatatcaatgcactatatctgggtcaagcataggcttatccttgtaaatttcatcctttttctttattatgagttgatattgtctgtcttttccactggactactatttcctccagagcaaaaactctgtgtgatgtatctttctatggagctggcacagagtatatgtgcagcaatttttttaacataatttgtatattttcttttttcaaagaaaaacttttcatcttaaaatattttaaaaatacaagtcagcaaaaagcaagcaaattaaaataatgtctaatcccacacccagaaatatttactcttattattgtagtataatcattagccatacggcttatactgtataatctgactaatctataatcacacatggcgattaattgcttaatacatcatttgtctatttcaagtgtcttaagcatctttctatatcagatattcttcaatatcacgttaaaggctacataatattctgccctattataaataataaatttatttaaccaattctctcctgttagtgttctgagtttcttatttttcacttctgtaactgaataatactgctactattgctccccgatcaaaccgagggtcaggctgcttattcttgcggcccaataatgagatgcagatgaactgggaaataagggagtttcttttttctttctttctttctttttttttttttttttgagactgagtcttgctctgtcacccgggctagagtgcagtggcacgatcttgtctcactgcaacctccacctcccgggttcaagtgattctcatgtctcagcctcccgagtagctaggattacaggtgcgtgccaccgcgcccggctaatttttatatttttagtagaaatggggtttcaccacgttggccaggctggtctcaaactcctgacctcaggtgatatgaccacctcgacctcccgaagtgcagggattacaggcgtgagccaccgtgcctggccaggagtttatttttgtaacggggtacacaaagaaggcctggaaattatggccagactaactcaaaatcacaaagttttccagagcttatataccttctaagctgcatgtctacatgtaagtgtgcatgcatttaaagacatacccttggtgggctttggttacattccagcctttgtataagggcactggcttttttttttttttgcttttaatatttaacttaaccactcagtcagtgctaaaaccgttgtcatggaggcctgcctgttcagccattagggagacctggcctgccgcactatgtctgctatgtcaaatgtaaacgattctctccttgaccaaactctagccaggctccactgtacattcttctcaactaggcctcaactttgacctttaaagactaaagacactaacatagtttctaagaccacatccctaggatgactttagtcccccttaaagtgcctgcctgagaaaactcaagactgccaaaagaatgcactgttgttccaaacaacacctgaagataaagcccctgtctcccacttctgtgggaaggtaggagcttaacttctgtaagcaccagttagcaaatatagatgggtttcatatgaactaatctctttctgatttttgtaatttttcactccactgagccctgctcacccccttttctgttccttcattttgcctttaaaatactcagtgacaagctgggcgcggtggctcatgcctgtaatcagcacattgggaggccgaggtgggcggatcacctgaagtcaggagatcgagaccagcctggccaacatggtgaaaacccgtctctactaaaaatacaaaaattagccaggcatggtagcaggtgcctgtaatcccagctactcaggaggctgaggcaggagaatcccttgaacctgggaggtggaggttgcaatgagtgggattgcgccattgcactccagcctgggcgataagaccaaaatgctcagtcacttctgcacaaatttaagttgaattcatttcatgctctactcttctttattggaatattgtatggattaaaatctgtactgggtgcaggggtctcaggatcaagtggcatctcttgatctgctgaaaagctaaatctcagaaatgtctcaaatgccacgttttcgttttgtttttattttttgagacggagtttcgctcttgttgcccaggctgaagtgcagtggcgtggtctcagctcactgcaacctctgcctcccaggttcaaatgattctcctgcctcaggcctcccgagtagctgggattacaggcgctaccatgccgggttaatttttttgtatttttagtagagacagagtttcatcatgttggccaggttggttttgaactcctgaccttaggtgatccacccacctctgcctcccaaagtgcagggattgcaggcatgagccaccgctctccgccggaaagttataaatcatgcaacccccagttagtgactgtggggcagtaaaaaacttacagaaaaacaagctaagcagtggcacgttattgtctatgcttattctttagcaaagttcaggaccctaccataattcttacctgttcttgtgaatgcagcttcaatctccacaaaagaaggtggaggtcagttttcctgcctcaaagtttatctgtaaactgaattcctcttgtaattatcttggcctctgctctagaatcagcaaaaaaacagtttagcctgtgaggtgagaagcaagacggagtcagtcagtcatgttagatttctgtcattagcatcagtgtgagcaaataaatttctgtcatttaagcctcccagtctatggtatttgttatggcaaccctagcaaactaatatgattactaacagtgaaatctggagcaagaaaataattactgtgcaataacagtatagaactttaacagaactctaattatacaccttttaggaatacagtaaaatagaaagtgcttgcttgttaaaaaaaaaaaaaaaaaaaaaatgacaagtgggcaggacatggtagctcacacctgtaatcccagcactttgggaggccgaggcaggcagatcacctgaggtcaggagttcgagaccagcctggccaacatagagaaaccctgtctctactaaaaatacaaaaattagctgggcgtggtggtgcatgcctgtagtcccagctactcgggaggctgaggctggaggattgcttgaacctgggaggcagaggttgcagtgagccaagatcccaccactgcaccccaagcctgggtgacaaagtgagactccgtctcaaaaaaaaaaaagatttatgtcaatatccttggcaagagagaaaagatggaagcaaataggccattgtaataattgagagaagtggataaacgggatatgaaatacgaggaggtaaaactcagcacaacttgggactcctttcagaagcgaagaagaagtaatgtccaggatggctccaagttcctgactccaggtcgagtggggatgaaactgagaagaaggcatgaagtgttgcaggcagataagcaaaggaagagtcaggaagcaaagagggcagggcatgagcatggaaaaagcgccaatgtttaggggtttatgtgtaggaaaagttatctaatgccaaaagagagcgtttaatctccctttaaagaggtggccaaagatagactgtccacgaggggaattcttcattttagagtcataacagcaagccaagggcaaaagagacagatctcacttatctgtgaatgcagaaaacaaaacacgtcctttaatgtcaacgtcttgagttctttttcccaggttgactgactaaatatctcagtacagatacttttgcccccttccaaaacgcaaccacccatgaccccgacgtgatttgaacacgcaaccttctgatctggagtcagacgcgctaccgttgcgccacgaggtcacggagaccctccattttccttttaagataagtatctaatcttatcctcctcccaaacaatttctttattatttgatttgatctcttttcacagttttgctaaggcttttttgagaaaaataagggagtggctggattaaatattaaccccaaacccaaataaatgctccatatatgaaaaacagtggtttctcaagttcaatctttctatttctcgaatttctctgtttcgagaaaaagtgtctatgtgttgggtttagattagcagtgaaacagtaataagaacggttatgaagtttgtactactactttctgtaaatgcgctagactactccctcttcaggaagagaattccagcattgcactgccccgcaagacctggcctagctagcacttacttcactcaaacccatccgcacacccgccccatcctcaacctaatgggattcgaaagcctaacataaataatatctctagcctaaacgttcacttctcagtccaaattcgcgggccctctggtctctattgtgtacacaagccattcagttcacaacaataaccccaaagaatccgttaacatttactgaactcaccgttttccactagccccatggattaacttcctccagcctagctattctcaagaagtgcctcacggtcggaagcagcagggaacctaggaaaaagggaaccccacacctacgaaaaagggaaccccacacctactgaatcagaaactgggcgtggggcccaccagtctgttttaactagccttccaggagattgggatgtaggaaaaagtttgagaatcactgttccagccaagaaacccgatattttgctctttcaagaaaataaggccgggcgcgttggctctgggaggccgaggagggcggatcacctgaggtctggagttcaagaccagcctgaccaatatggagaaaccccgtctctactaaaaatacgaaattagccgggcttggtggcgcatgcctgtaatcccggctactcgggaggctgaggcaagagaatcgcttgaacccgggaggcaggggttgcggtgagccgaaatcgcaccactgcactccagcctgggcaataagagcgaaactccgtctcaaaaaaaaaaaaaaaaaaagaaaagaaaaagaaagagagagagaaagaaaaaaaaaaagaaaagaaaagtccagccttctaagatggaggaaggacagtgtattagttaactgtgctcctgtaacaaatactacagactgggtggcttagacaaaaatcattttctcacagttctggagactagaagtccgagatcaaagtacttgtctgtttgatttttttttctcccctgaggccttttttgttggcttgcaggtgactatcttctccctctgcctttaaatgattttttctctgtgtgtccgtgttctaatctcttcttataaggacaccagcccttatgatttgggccctactttcatgatctcaaaataccttaattaccccctttaaagaccctatctccaaatactgtcacattctttttccctttatttataaacattatttcattcatttctccattttgcagatgaaatactgtcacattctgaagtactagagattagggcttccacatatgaatttaagggggttggaggaaggctaaattcatttcacacaggtagtttccagacgaagctgtactgacaatatccgagcctggcatagggaaaagggataggaatgggggctccatggtgaacatctactgtctctttgcttttcccactcctggtttaggatttagctttctcagggctctcaaaatcagcgactcctcaatcagctttccagatgacaaaattttgtttctgttatctcctctccctatttggatgtatattttagtgctgtttgagtgagatctgcggagtatgcaaaagtaaattcttgtgtttaaccctcgatctttacctggaagcatcgtaaggcagcggtggttccctgcatgtggaaagcagtctggttctgcctttgcctctccagctctcaactcaaacattcctttctcatcgtggcctttctctctgccaatcaaaagataaagcactcgatcagtagttattgaagtaccatattcctgcccttggcagttatctagttgaaatttcacagtttttttatatagtttaatatattttaatagcaaacttacaggaacagcacagaagacagacaacattaaaaacatgtatttccatataggacaactcagaaaagtatagtgaatggatgaaatctcagaaaagtatagtgaatgaatgataaagatgctacaacaccatttagtttccgtcaataagaaatttacttgtttaaaaaaaaaacaaatgctggcattgtccagaaaaatttaacagatttatttataattattataaagttgaaccgctgaaacttgttcactgaaacattttaacttgcattaaggctgtacgtttccgcatttatattaaaaattcacacccaaatgaaaatggaaaaactgccaatacctgatttctgtcccctatttttccactcgcaatcatatacctaggtaccttttgaccccatgggaaaaaaaataacgttcagaactaccaataacaggaagaagataatttttttaatgaaatttttcccatcatggtggattcttaagcacgttctccacgtatgcggcgtgctagctggatgtcttttggcataattgttacacgtttggcatggatagcccacaggttgttgtcttcaaaaaggccaaccagataggcctcacttgcaaagcaactatagctgctctctggaagcgcagatctgttttaaaagtcctgagcaatttctcgcaccagacgctggaagggaagtttgcgaatcagaagttcagcggacttctgataacgtctaatttcacggagtgccacagtaccaggcctgtaacgatgaggtttcttcacccctccagtagtgggagcactcttgcgagaggcttttgtagccagttgcttcccgggtgctttgccaccggtcgatttgccggtcgatttgcgggcagtcggctttctacgagccgtggtatagagacctccttacttaccccgcttctcctttggctggagctcggcgagcgagaggcggcgctgggctggcgttggagagcgacggcaggacggctgcggctacgaacacaattgcagtattttttttttttgacagagtctcgcactgtagccccggctggagtctggagtgcagcggcacgcaggcgcccgccaccacgcccagctaatttttgtatttttagtagagacgggggtttctctgttttggccagactggtctcgaactcccgacctcgtgattcgcctgcctcggcctcccaaagtgctgggattacaggcgtgagccaccgcgcccggccattagatttttttttaccattagattaaacttcgtctttccccaaccaggctgtaagtttttttcaggggttggaaattccttggtttacaacaatgatttcactatacttggtacatttacagctcatagggaggagattattttccatcaaaaaatagttctgatttgtaacccgggaccacgtggcctaatggataaggcgtctgacttcggatcagaagattgagggttcgaatccctccgtggttatttgagatactgactagtctggtgttattttccttcctcaaagctggtaatcagaaatgtacttctttccatttacttcactaagttatcttcattgtagatcccttccttcacatcccttgcctttgctctgtacttagtctgtttatcctctctctctccaccataatgccatacagtccatcttctgggcctgcgctactcaaaatttggtccagtccctgaaccagtaacataacctgggagcttcttaaaaatgacaacttttcgaggccgacctcccttgctagtccgcactacacttgacctacctagaatcgctgtgtgtaggctctaggattctgggttttaaccaagctatccaagtggttcgtttgcacactcgaatgtgagaaccatttacagaccttacaggctgtagaatgcactctagaccataaagcacgtcagacccaattacaatttagcgccaagctacgtgagttttaaggctattacgacaggggtaatgtgaagctcccacgggaacctcttggaaagactggggtacgaaggaaggcagaaaagaggtccacacgtttgacaaaagtatcttctaacaaatacagaagactggtagaattagaagaatcaccatttgcaacccttagaaaaataatagaccaaagcaacgaacgagcttaacgaccttaattaaaaccgttaggaaaaggtggttgggaaataacatatgctcatggtgttaagtgccaccccaaaactacttgtcaattgcaaagagagaaataaagaaccttggggggcaccactcggtcttcaccatcaacaggatatccctacaagtgccttctgatgtgaagttagtacagtgtaaagaacagcgtctgggcaaaaatgtttaacctaaatctaagcactcaaattaatcacaaaagcaaatttatcttctaatttaaaaggaacaaaaataaattaaaagatgccataaggaaataatgagacaaatccagaatgtaggacattctatgagacaattagacttttttgcttattttgttttgtttgctttgttttgagacagagtctcgctctgtcgcccagggctggagtgcagtggtgaaatcacggctcactgcagcctcgacttccggtgatcaagtgatcctcacctcagcctcccgagtagctgggaccacaggcacacaccaccatgcctggctaattatttttctgttttttgtagagacaggatctccctgtgtttcccaggctgggggaaggaagggaggaagggaggaagggaagaagggagggagggaggggaagattaaaagatgtcatgaggaaataacaataaaaagaaaaagctgggaaactgttctaatgtgaaagaataggaaacataaaaactgactctaaaaatatattagataaataaatactcagatgtttttagtcacttatttagagtttctttccgtcgcccaggctggaatgcagtggcgcgatcactgtaaccttgaactcctgagctcaagccatcctcccgcctaaaattccggagtagctgggattacaggagcgcgccaccaggccaggctgattttttaaaatctgttttgtacagaggcacaagagaagggcttgttttgttacaggtgctctcaaaccctggggtcacgaaatcccgcgtcagcattccaaaacgttacaggcatgagccactgcacccaaccagatatgagatatttttaaagaattgctcgattgttttagttttgttcatgatattgtagttaaataaaagacgcatgtttaggcgacacatgtttatggattttggtgttctatatcacaatgtctgcaagtgagtttcatatgattcagtagaaataggtagatgaggctaagacggcaaaatgttaattattgaatgtgggtgatgagtatacagataattgcctattctttcacattctttatatgtttgaaagtttttacaataaaaaatttaatttttcaagaaggcttgacagaggctgtgctatttttaaaaaggccttgaaggatgagctctggggctccaagcaaacatggcagaggtcagggcgaagaaacccgcaccatctgagatagggctggtcctttcacttctcaggagttccaggcccccttgacagagtgaccagaagaggagctgaaaaggtcggacagatgcagaagatgaaggcctcccatgtcatctgcgatcttctcgctaggccacagggtaccttaaaggcattaaaggaggtaagggacacagtcagaaacacattctgggttagtgctaacttagctctacttacataatctgccctcaactacatttccggtgttatctctcatcaatgcccttcccagtacccctccaaaaagcaatgtttcaactagagggaactttcttcagtttctcccatattccttgaggtttaggtttggaacactaccctaccccgttttctcaccccacaccaatttgtctcattttaacacatccttcagatccagatctgagcttaagtataattcattccaaaaatacttaattaagcacctatggaggactcagaggtaaagaaggtaaaactagaacctttcttcgtgaagcttggagtctaagtgaccctccaggcaaccacctaaaacctttgtggttgagatccagaactctttctgtgggctacttactgtgttagggctgcacttctcacttgcactcagttgttttattgttaacttctgtaatcctttagaaatctcgctctccattgaatgagcagtacctagcaaagtgcttggcttttgctatttcacataaaaagaatttgaaaaaaataggcaattctctgtctcactacccatatacaaagtgcttatttttattctaaaaaaataaaatttttggaagaatgaataaatgaatatattatttaagggatcaggaactggaggccaaaagactaagaagttgttgcaataacttaatgagaagtttctcatgagtacttctaagtacctaaactaagtacctcattttaaaaagtggtctgagtagctgggcatggtggcacgcgcacctgtaatcccagctactagggaggctgaggcaagagaattgcttgaacccgggaggcggaggttgcagtgagccaagatcgtgccactgcactccagcctggatgacagagcgaggctccgtcaaaaaaaaacaaaaaaaaaaggtggtctgagggctggggaagaagagccagatttgagagctaattagaaggttgaattgagggcctgctgggaagggaatcagagagacataaaaggacaagggtagtcttcggtcttggtagccagtcttcggttttggtatctcatcaaaaatttggattgttggaggaaatttaagtttgaggaaaatgatggaacattcctttggggttgcattgcttttgagatgcccatggacatgcaagaaaaaaaaataggacaactgtatattctggagcccagaggagagagatctggagtagagacgattttcaatccatccgcacatgagcagtagttcatcaatcattccttacccttcttctgttcatagagttgggccattgatgaaatacagaatccctgacttgctcactaatactcacacacacacacacgcatagtattgtggtaatggtagtgcagttttagaacctggggttctgctcttcctttggaagtggtctttgaatataatttcaaactattcacagaatatcagatgcagttgttcttccccttgtgagagaaggccccataaacgaaagaggatttgaccagcaaaaatattttttactttctagtttctttcagaaatgttctttcagctggttaaaatattctgagttttatgaaaagacagaagcctatcttcactgaagaaccttttgatgaatctagattctggggttttacaatgatagttacaattgtactgacatttgttgagccgttagtatatcgcaggcactggactttgtcagaaaatataggggatctctgtggaacatcagtgttatttactgaggataattttctttctttttatttttttaatctattttttattttttttttacccccgagacggagtcttgctctgtcgccctggctggagtgcaatggcgcgatctcggctcactgtaaactccgcctcctgggttcaagcgattctcctgcctcagtctcccgagtagctgagattacaggcgtgcaccaccaccttggctaatttttttgtatttttagtacagacggggtttcgccatgttgggcagtttcaaactcctgacctcatgatctacccgccttggccttccaaagtgctgggattacaggcgtgagccaccgcgcccggcctgaggataattttcttactaggcaaaaatatgagaattgtaaaagttgttgaaacatattcctgatttgcattataaaaaagacccaaagaacattcttagcgtatcatgtatgtgcctgaatttgaagtttgttgattgcttccaagttttattcttaagatacgaattcagctattattaaatccctaataaaaggagtacaatatgtgatgtatggaaacatgtaagacatttaataaggtttttggtatctgtagtcgtggccgagtggttaaggcgatggactagaaatccattggggtctccccgcgcaggttcgaatcctgccgactacggcagtgggtttttgcatcttcaagcaggtttcatccgaccgatcgatatttcacgtgtaaaaaggctttcgatcttttacaagttaacatcaaaatggatttcttggggattcagggcaggacaatttcaatttatgtctcagaggtcctcaaaatggatttctcattgcccaaagtaaaccttatctctgatcttttacaagttacatcataatggatatttcattgttcaggaaggaatcattgtgcacaaggatggatttctcattacccacgaaggaatcatacttcatgagtaaaacaagtcaaaggaacaaataaaactatattttgttttaattggagggttttgggttcaaaatccttatgatcagaaagaaataaaatttcatatattcatgtataggaggacgcggtaatcccaaaacgtttttttctataggtataacgcctgtcttcgttcgtcagagggccagtggcgcaatggataacgcgtctgactacggatcagaagattccaggttcgactcctggctggctcgttcgactttagtggaaactttgaggtttacataaatgccccttccctgggcactcatatacattttatgtattttatcattttaatttttaaaagaattacacaagatgacaaaaatttttataatatagactccagcttcagttcactattgttttacatacataagagttttttttttttaaatcacatcactaaattgataagtttcagaactgaccaattttcacattgcttgataaaacttaatacaggggaatttttttttctttttttgagatgtatcactgtgtcgcccaggctgcagagcagtggcgcgatctcagctcaccgcaacctctgcttcctgagttcaagcgattctcctagcctcagcctccagagtagctgggattacaggcatgtgccacgacacccagctaattatttttgtatttttaatagagaggaggtttcgccatgttggccaggctggtctggaactcctgatctcaagtgatcagcccgcctcgccctcccaaagtgctagattacaggcgtgagccaccacgtccgtttgggaaaaccttgtgtcattctgtgagagttacgattgagaattcacaaacagaaaatttctagatagcaaacaattttggtttcttttctatccttttcgcatactcataatttcaagaatcacttgaaacaaaaatcaagtctcttctctgctccctgtcctctagcaatttttaaagttattgaaacatattcctgatttgcattatagaaaacacccaaagaacattctcagcttaccacatatgcgcctgaacttgaagtttgttgattccttctaagttttgttggcaggacgtgaactcagctattaaattcctggtaaagcgagaggtacaatatgtgacatataataacatgtacgacgtttaagaaaacttttggcacctatagtcgtggctgagtggttaagcctactttttaaacatttaaatagcttattttaaaattatttacctacatatctctaaataatatgtttgtatggaccttctgttgactttatataagaggagtaactggttcactttcttcttcacaccccaggacccccgacacacacatgctccctttctaagtcttctcatatggttatagcacaatacatgatactttaatatttgtagcttaaaatatgacaactttataaacataattcaacaagtgggcaaagaaatacattgttaagttttcctttccttgcaatttttatttttccccggcattagtacataactgtcttttcttgttgttttactgcttaagcttctagacacttttcattaattcaaccccaagcatttcgtcagttgtctaaacatttctccaaaagttcaaaagctttgcacagtctgtagatttcatcctactttaaacatgtctccttatgcatctgtattagtttgagtaaacagaaaaataagaacaggaaaaaaagtgtcacctacagcctgctcaaatctggacatgttactatatgtcacatatggtacctctcattttactagggatttaataatactaggtgagttcatgtcctactaataaaactcggaaggaatagctgaaataacttttgaagtttgctgtaaatattagtgtttgtaattatgcagaacggcggtttagagttttatctttgctctaccatttactagctgcatgactttgggcaagttagttaacctctgcaaaccccaacttgcagacaaaccccaatttgtctcatttgtaaagtaagagtaatagcaagtatttacttcgtagaattgcgaggaataaatgattcagaacttggaatagtgcatggtatctattaactgttcaaacaatcaaagctaaaactactgcttttgttatttttaatctaattaggatagtaatgtattgcaaccagagatatagatctctgagagaggtgcaaatcaaaataagttcccttacggtgtccatgacaattataccaatttcctcctcctatgaggtagatctatttttggaagggggaaaaacaaatccacaaaacgctccctagcagaggatggtttcgatccatcgacctctgggttatgggcccagcacgcttccgctgcgccactctgctacgcgagtcacaggtcccagagttaatagtcaccttttttctagcgtgtcaagtttccaaatctcaaaattatgtcttctctcttttttttttttccagagcagtaatctgttcgtaatatggccataggcttagactactactaagaaaagagttaataagaaataggaaaaaggttattttaggtacacttctccgatgtaatgtttgtcactgtgtattgtgtgaatgtgtacagtaaatacataagagaaaatctgctaatatttcaaatgtcatgttttaaagtcattgtaagttataaaaatttaaacacttctgaagaaataaacgtacttttccttttttccatgttgtaatttgctaattcataatctgtagggggtcttgagccacatgtggggaaaaaaacggcacattcatgcacattttcagataatactataagggggttcacggaatagctagccttctctgatgtaatggttcattccctgtatgaatttgagaaagtaactgcattcaggttttctgcctctggaaatcaagtgacttcttccgtgatttgcagggagggttgaggaaatcgcagagatccagggaagttcaatggaatcgctttagcctggaacagctgatccaaatatgaagcaggtaagcttaggtcatccactcaaaccagactacgtctctgcgaagatctgctaagcttctgaaggttggagagacagacatggatgaaaagataaggccgcgggcgtgggagtgagtatggagagaagtccaggagggtttaacaatagggatgagttgctgaagagtataattcagaatgtttgcaataaaagagtgaaaacgtctctataaacccggaaataagccccaaaataccataacatattcctgtatatatcttcctactaaaaaaagagaagggggtagttttgaggaggctaaagtaactgagtatacaagtgcctaagagaagcaggaaaagcaacttttttccccctgtaatatgtaatgtactccccgccatacagttatctgagccagcgagctaaaaactgttgaccccgacgtgatttgaacacgcaaccttctgatctggagtcagacgcgctaccgttgcgccacgaggtctccgggacacctacgttttatttacctgtcaatctgattcatgaaaataatttcggtactggtgaagaccaggcagctattaacagatacaaaatagtgcctagctgcttccctctcggtaaaattgctgtccgcccaatcactgattttctctgcctctgaattgcttcattttcacctgttcttgtttatatttcattccgtttcttacctagttttccctgtatattccaaatatagacgtcttgggagtttcgttgtttttatctttatagaaatacattctgttgaaggtcagtcgctttggaatggggttgtagagaggaggtagcgaagagggaataatgaggatccttcctctcccaactcctcattaaggaactctgatcaaggtgagttttaaattcgtttccaaagttcactgcaggtcacaaccagtgtttccgttaacgaattcacgcgggggctggcaggttgtttgtgctgcatcttttctgagagataacggcgcctccctgtagcctccgttctcagctgatgagagagttgatttcacaccccgataattcttcaaaatcagatcgctggacctgaaactgaccctaaaaagaacaagaaatcctgtcatcaggagtaagtgggttattctggcactgtgctttgtttggctggttaaagaacctgccttgggtaaccagagatcggagttttctaaagtcagcggggtttgtctggggaccccgaatttacatacagacgatctccgcaaatagtgcaggggccgctttgaactcttaggaaaagatattccaaaaagtggtccactgctataaaacactcatctttctctgaaaattaaggaccccccgcctcgccccaccccgccccaccttttcccccgccttgctgtggactagagaaaggtttccctgtcttaattctgaaaaactgtccaaagcccaagggctccagctggcgattgttaaggaccataaatcctaaattgaaggagtttgtgtttgacctgtagatatcagagtagctttggtaggttgtgtgctgttatttggctgttaacaagctaaggtcattctacggggttgtggaaagagattagggggcttgggtgaggggtgcgttgggagtcagaagcagtgggcaacgaaatgaacgggcgtttcagaatataaataaccgagggcttaggaggatctgcagcagcttacagaatgaaaggatactccagatttggtgttaccagagaatcctgtgtgatctgctgttgactgaaagttgaaatacatacttttctcatctataaaattgtgataataatatccacctcataggactgttgtgagtttatttacgtattgtgcgctaaaagagtttatacatgcttagaaagatgcctggcacatcaattgctctcaataaatgttagtatcactataaagtttggtgaaattcttactttgttttttgtttttgttttgttttgttttttgttgtttttgttttcagagacagggtctctctctctctctgttaccgaggctggagtgcagaggctccaacacagctcactgaagcctcaaccttcagggttcaagccattctcctgcctcaggtttcctagtagatgggactacagggccaccactcacagctaaagtttggtgacattcttaaatgcatttggtgtagcctcattcagcagagagtgtagtaaaatttacatttatcaattcttgatttcttccataaatttacattttggtgttagcaaacaattaaatacatttgctcattttagatgttagaatttttctgtaatgaggataacaaaaaaaaagtagtaataatggacatcatcccaggttgcagctaaaattggacaggacattgacagcatccagctgtggagaaacctggaaatgaacacaaattcagatcagcaactggaatgaaaaactcagtgaaatactttaacttatagaagtttactcactcattttaattgatatttaaatctgctgtgattcacagcacagcagattgtctggttatttataatgaactgtttttaacacagaagctagtctgggcccagcatggtggctcagcactttgggaggctgaggtgggtggatcacttgaggtcaggagttcaagaccaggctgggcaacatgataaaaccccatctctactaaaaaatacaaaaattagccgggtgtgcctgtgatcccagctacttgggtggctggctgagacacaagaatcacttgagcccatgaggtggagcttgcagcgagtcaagatcatgcaactgcactcctgcctgggcgacagagtgagattctgtcaaaaaaaaaaaaatatgaaggtctgtttcttttcccatcagaaacacagccaatctacatttcccagcctcccttgcaattagatgtagccatgtggctgagatatggccaatgaaatgtgggaagaagtcttggtttaggaaaacttctcatgagtgttcctttctctttctgttggtcaaatgctgaagatccagtgaagaactccatgatcctagagccaaagccgctcaatgatctcttggtgatcactggtaagaccaaccagaaaacctgcattagatgttgcctgaggggaaaaaagacatttattgagtttaaaaactgagacttatggttatagctgtgttatagcaactccattatatagtaacgcaagtgttaaagctaatggtatcactagctattcataactaatataacaatgctttatttctccttgctcatttgtctcccatgttttagtgcataaactaatctcataattacagcattctcataaaacaccatgtaataaggtaactagaatcattaacacatacatgctaaacatatggcagaaaatagaattttccaaaattctaaaaattattacctcatttaataatgcatcattgtttcgtaaattaattaggatatctcccgcactttactttctcaccctaaaaaaccaagctgagcagaaatatataaatagataatactctttagtaaatgcaatacaaggctgggcgtggtggctcacacctgtaatccgagcactttgggaggccaaggcatgcagatcccttgagcccaggagtttgagaccagcctgggcaacttggcaaaaccctatctttacaaaaattagtagggcatggtggtgcacacctgtagttctagctactcaggaggcgaggtagaaggattgcttgaatccaggaggtcaagattgcagtgaaccaaaatcgtgccactgcactctagcctgggtgacaaagtaagaccctgtctcaaaaagaaaaagaaaaaaaagaaagctgggtgcggtggctcatgcctgtaatcccagcactttaggagactgaggtgggcggatcatgaggtcaggaaatcgaggccatcctggctaacatggtgaaaccccatctctaccaaaaatacaaaaaaaaaaaaattaaccgggtgtggtggcaagtgcctgtaatcccagctactcaggaggctgaggcaggagaatcacttgaacctggcaggcggaggttgcagtgagctgagatcgcgccattgcactccagcctgggtgacagagcgagactccgcctcaaaaaaaaaaaaagtaaacgcaatactaccctaaaaatgttatattaatgtgaacttcgttctaggtataatcttattttagcctgactcagatttcttcccactctcatcaaagcaaagatgttttttaatttattttttaagaaattagtaaatttcaatcccacatttatattttgttgagctccttactgtcttggtcattcccagatgggtgtgctggtaaatgtttaacaaccagctcttgagggaaagacactatcttagcaagtagtgcttgcaaattctctcaccataactgattcaaactacagatgcagagtcactgaatgtgaagttgggaagagatgtgcataacgggctcctgtgagccagtacaaggggctctattgtaccaccaaggtctagtctatagttttctcaacagtaatgacacttagaagaaactaattgtcttagtctgtttgtgttgctataaaggaataactgaggctgggtaatcttaaagaaaagaggtgtatttggctcatggttctgcagaatgtacaagaagtatggcaccagcatctgcttctgatgagggcctcaggaagcttccactcatggtggaaggtgaagggaagccaggatgtggaggtcgcatggtgagagagagaaagtgaaagaggaggagatgccaggctctttttaacaaccagttctgtgagaacaaagagtcagaactcactccctccagtgagaatagcaccaaactattcatgaagcatctgcccccgtgacccaaacacctcccccaaggccctgcatccaacatcgggatcaaatctcagcatgagatttggtggggtctaacaaaccatatccaaaccatagcactgacatttattaagcatttatgtgccaataatatttctctgaatttttatatgctgacatataatatattccatctttacaataagtctgtgaagttggtgctgaaaacataaaaaattgcccaacatctagaagctaaaagctaggacaattgaacacacacaatttttacacacaaaaaaattgtttttgtttatcttgttgcatggtataaacaatgatcagacaaggccgttgtgttacctgagatggaacaagatgaagacaagatcactccgtaactatgtatgacacaggaaagaaataaggacactctacatccataaaaaaaagtaaacaccccttttgcaggatagtagagtgactatgatttcttaccaatgacatccccagccccacttgaattcttctcctgcctcctagataaaaattcaaaaaagtgactcacactgttactgaattgctccacttcctgaccacacccagtccagagctgatatttgattcccttacactctccttagaatagtaagcttctccaaactcccccttacctagatgccttactgttccactagtgttcattctctcttgctgtagcaagtttaataaacctagctttgtttgaccacaggtgtgttcctagaggtctttggtagcagactttaacagtgtcagtagtttcattttacagaaaagaaaattaaagtttaaactgaagagttagggagcctgttgtttgagataagatttcatataagagatcactttaccttcctgcaaggagcagatgatctaggctgaacttataagacattgtcacaaacagcaaaatgaactggctgccaagataaggattcacagatgggtaacccagagattagccacaacaggaagctattatcacccctgaggatggaggggcagtgggaagaggccatgttagagcccagagtgggaggtagaagggtgacagtggtctgcagaaaatgaccatcaggagctagaattccaaagggagaatctcagaccttggaatggatgcagctattgcaggcaatgctacaggaagcagaaagaaagaatatcctggcctcagggttcctcttgaattccaaccttttgtcattctcccattggctaatcctacccagaagccagaaggcaaggatgttcaaagcagaagaaggatggggaatgaatctgacaacaaaaagtcaacctgatttacaagacaacttgattgacacctcccaattatgatcaaagtattaaatctactgaaaacgttttaatgaggtcgggagcatgcctgtaatccctgcacttcaggaggccaaagtgggtggataacttgaggtcaggagttcaagaccatcctggccaacatggtaaaaccccatctctactaaaaatacaaaaattagccagacatggtggcacgtacctatagtcccagctactttggaggctgaggcacaagaatcacttgaacccaggaggtggaggctgcagtgagccaagatcatgccattgctctgcagcctgtgcaacagagggagactcagtctcaaaaataataataataataataataaattcatagtaataaaaatgttttaatgaatgtataaatgagtcttctcattggagtttgctctttgaactaattgcttctaatatgcagtttctaatcataagaactccaatataacatagggttatatttaatatgtatttatagaagtgcctaagttttatagcataaaaatcacagggaacaacaaattacaaatattcaattttaaaaagttttcttttcttttctttttttagactgagtcttgctttgttgcccaggctggagtgcagtggcacaatctctgctcactgcagcctccgcctcctgggttcaagcaattctcctgcctcagcctactgagtagctgggattacaggcgcacaccacctcgcccagataatttttgtatttttagtaaagatggggtttcaccatgttggccaggctggtcttaaactcctgacctagtgatccacccacctcagcctcccaaagtgctgggattacaggtgtgagccaccatgcccaaccaaaatgttttcttttctaagacataattatcaagtatataaaacattccatatcccagatacaaaaacagtagtaattcacttatgaaagagtggcattttgatagtaggacagtttgatggtttgataataggatttttgttggtttgtattcaatataaagcactttaacaaaaaagccaggccatgataagttaaaggtcaattctttcactagatttccttgctttgagcaaaaaacgtttaaaaacttttttttgtagatttgaaaaaccaggccacaggaaacatctcaaatgtccaacagtccttagggtagatcaagggtcaggaaacatgcctgcaggccaaatgtggcctgctacctgtttttgtattgcctacagctgtttttacatttttagattgctgaatataaattaaaagcagaataatcatctgtgccacatcaacattatatgaaattccaatttcattgtccataaataaggttttatcgggacacagccatgtccattcatctatggctgcactacaagagcagttatgaaagacacaggaggacctgcaaagccaaaaatgtagcagaaaatatacagaaaaaaagagttcaggcccctgcaccacagaaaggtgttttcttgcagacagaggcagctgttcccctcagcatcagacgcatctccagaatttctttcttatggggttagcacaggtatcggtaagcagaaagattcagaaacttccaacacatactgttgcccaaggccacagcctgtgggagacttgaacttggggtggcccctagttccagctgactcctctgcttgtcagcttcactccctctgctcaggttcccagctgtgactggaggcccagctggagctctgtgcttgggctccacagtccccattgtatccttataatagtatgatacattccttttttgttttccttaattaagtttgagttgcattgttagaaaccaagtgttaggatatgaaagctcaactcttgtgtatgtgtatgtgtatgttactttagaaaaaacattctttccattttgcagggagggtaggccaccatgttcttaatcagcaggaaagtaaacaggctcttttgtggttctagatgagtgatccatccatccattcatttattcattcaacaaatatttattgttggcctaatgtgtgtgaagcacttttctagacccaggggatactacagttaacaaaccaattaaaacaaattcctctgttcgatgttactctgcctggatatgatcctagggacaatcgtagccatcttgtgagcatgaagggagctaagctgatgcattgcattaaccttgcaaaatgtaaagatggaaaaaacctgggtccttaatgaggatatattggaattgtcctctgtgttggtcaggattaaaatgcaaacactcaaacacactttagattgtttaaacaggaaaacattttttacaagaaatgttgtaacatttctatgttgagcattcagattgacttccagtgccacactgcagaattgaaccaccgagggatctgctgactcttctaaaatcactacagtgtcactaccacagcactacagcatcactgccacaaccaagaaaaccaccaccatcagaaagctcctgcctgctgccagctccagaaccatgcagcacctgcatcaacaccagtaaaacagatgacttatggcctgcctctcaagtcttaaaaatccattatgggtcactggagactctgctaacaacactatacaggagaaccaaacaacagttaaaactgcagaaatgtagcctcatttctagcctccaaattccatgtgactacatctaatttgctagatatagtttgtttaagctacatttttttttccaaatcatgactgcctgagaacctgagagatgtagtgttttgttttcctgcctctacagtacagaaaagatcactaggaggagagagaatgactgtggcatgccaccttactagagcctctccatgtcctacctgagaacttcttgttaattgagaaaactcttctttattgtttaagccaataaatcaatctgacactccagggtgtggaatcagttcatgccagaatttaggccttctaagcccaaccctgttctcccacacctaccacccctcactaactttggttttcacacctctcccttctctcatgtgtggtagtcacaatattcaactaaagagctcagagatgagactttccagagaagagggtatcacagccaagttaaatctatagaggtctttcttaacagataactgaaacagaatttctgagatctggtgaactcagcaagaaacataggactgacttagtttctttctccatgggtgaagataggaagacaagtttctcagagagtgaagagggatgctttaagaaagaaactaagaccttctccgtctgctgaactatccttgacaatacccttattttgggttccttcttagttactcttccaaagaaaatgacttccccatttccatccccaagtaactaaaatgtctacatttcctatagaaacaatggcatatttcagcaactaccatatgctgatcactgtttaggaatgcaaaaaatatatcattcttgtagaagatgtttattttcagtctttaaatgaaatctctcttaatagcaggctcaattcaaaatcatcttctagtttttaaaaattcgtagatacgtggacttttggaacatgttttctaaaaggaccccaaccacctttttatggattcagttttgtgtcccccaaaattcatatgttgaaatcctaatcctagtacctcagaatgtaaccttatttggatatagctttgggaggacctgaggcagagctgtagggtgtaggggaagctgtggatgcttcctggttcctctgggtgtgaatgtggctgacgggttcagaggctgaggatacctcgccaggatgctgaggaaagaagccaggattttagtggttctgcactcagaaaccagggcacaagaacgcagaggcagatgccctagtggacagacgaccagggagggccagcggttcttctccatgcgtggacacaggagcggtcttctcttcatgtccaaactgagataccatctgaggaaaaggagaggcccaaaattaattaataaagccctgaattgactaggacgaagaccattattgactcaggagtagcctggtttgactaagatgaaggatatgccattaagcgggaaggggcagaggatggaaataaagctcagtttgcattcatataaacgtacaggcgcgcaccatcatgcccggctaatttttgtgtttttattggtcaggctgatctcgaactcctgagctcgcgatcagcccgcctcggcctcccaaagtgttgggattacaggcgtgagccaccacgcctggcaacgcctctaggagcaaaacgtgcatttcagcttttgaggttccctgctgtgcacagccctcagcttgccatctataggccgctccattgacaggggttgagagggtgagactttctcaggcccacggcacaggcagtgatgcatatccgccatgagggggcggcgaagcctagagaaagagagagacacctgagacgagttcgaagaggcgggaggagggaaaaagctggggcgggaggaaaggggacgggcagggagggatggagaggaagagagagaaggagggatggagaggaagagagagaaggagggagggagaggaagagatgatagagtgagggaacgaggaggagacgaggaggacttgtgggaggaaagagagagcagagaaaaggtgaggagtgggaggagggagaggagagagggaggaacgggaaggaggagaagagtggagtacgagggaaagaaggaggaatgagaggtgaaaggagcaggggaggagggaaagcaagttactgaaggggaaaaacagttctctggacagcagttagcgacagttgtagagtactttacattttacagtgtgtcacagatactggctcatgtttccctcacagtaacaacccaattaagcggtaagcagtaattgctgtccacgtattattttcaacctgaaatgttatttttaacaaaacatactttatatatgacaaaataaagagaaacattggggcaagtgtacagactaatgaacatttactacgttttagtttagtggttttttgttttgttttggtttggttttgacacagagtttcactcctgtcacccaggctgaagtgcaatggtgctgtcttggctcactgtaacctctgcctccccagttcaagcgattctcgtgcctcagcctcctaagtagctgggattgcaagcatgcgtcaccatgcctggctaattttttatatttttagtaaagacagggtttcaccatgttggccaagttggtcttgaactcctggcctcaagtgatccagccacctcggtccctcaaagtgctgggattacaggcatgagccaccaagcccggccttgttttttgagacagagtctcaaaaaccaaggctctgttgcccaggctggaatgcggtgacacaatcacagctcactgcagctccaacctcccgggctcaagtggttcctcccacctcagcctctatagtagctgggactacaggcatgagccaccatgtgtgagctacatttcatggtctctttaaatccatttctatgttaattctcagatctctgaatagcatgtcaccaaaaagcatgctgtctgagcatgtcagagctcagacacagaggcaaagggacagagcagcacacaaaacttaacagaagtgcgttctcaaggagtcggcttgctaatggtacagagagaaaataagtaacacgtaatgtcagatgatgacttaaatgttatggagaaaaattaagcataggcatggaagtaggataaagaggggcaggggacagggaagtggttagggagggttttaagcagccttctcatctgtcaaatggggacaatagcccctacctgcaggcaacacaccctctttccaccaatcatccttggactcctctcagggagtcagccgggacagtacccagggtaagtcatcttacctctcccctccagcaggtctccaatagggaaggagggatggttactgtacatgtgcccttcacaatttcagatccttataactggaaggctcattctaaatgactagaaagagatcctgagggggtcttatttccagcccctccaaacaaatttcagatcagaataccatgctagtcttcaacttcttagcagaaagggaagttataaggtctcccagggaaaagcacagatttatcagcagcaggttacctatttggggtccctcctagaaggagaacaacgtttgttccaagacagatgggaggtaatatgccaactataagcaccagggacccagaagcaactctgagagttcctgggaatggcctggttctgccacctctggattcctaattttggcctcattgcccacccctcatataaacaatcaaaaggaaaggacatgggcccttttaaatggatggtagaatgcaaccaagcagtccaagtggttaagacccagcttatgagagccccagcatcagccctatcagctgtaagcaaacccttccatccttatatccatgagaagagaaggaatatccctaggggtattaaacactagcctctctgcctcgagtctacttttctaagcaactggacctggttgctaaaggcaagccatcttgcctctggtcagtggcagctacagccctcctcctgaaggagacagagaagctaacctttggacagcccttaaccatctggactcctcaccatacccaaactctcataaaagaaagggaggcagaatggcaatccccgggcaggaccctctagttacaggtaatgcttattgataactcccatataattttaaaggtgtgtaataattagaaccctaccaccctctttccatctaaggatgggcatttattccacaactgtctagaagtgatggaagaagtatactccagtagactagcccattgaagatgcagaagccagccgggcgcggtggctcatacctgtaatcccagcactttgggaggctgaggcaggcggatcacaaggtcaggagttcaagaccagcctggacaatatggtgaaacccgatctctactaaaaatacaaaaaaattcgctgggtgtggtggtgggcacctgtagtcccagccacttgggaggctgaggcaggagaattgcttgaacccgagaggtggaggttgcagtgagccaagatcatgccactgcgctccagcctgggtgacagagcgagactccgtctaaaaaaaaaaaaaaaaagaaaagaaaaaagaaaatgcagaagccgaatggttgactgaagagagtagctgtatgcaaggaggacaaaggaggacaagttatgctatctcctatctcactaaagttatagaggcccatgccctcgctatgggatgctcttcacaaagcagaacttattgcactaacccggctgctggagttgggggaaggaaaaattatcagcgtatacacagattccaagtatgcctactgtatgctacacacatggagctgtttggaaggaaaggggcatgttaacatctgataacaagcaggtcagaatggtgctgtcatttttaaagctattggactttaaataagagaaccagcccataagagaacaagccaggtggcgattgttcactgcaggggccaccaaaagcagaagcacaaatacaattattaatgattgtttttcagggcatgtcctcaaatgttgaccccaggatgcatgggaccctgaaatagaactggggtccatagggttacatgcctcccacttccatgcctggttacaagggcttaccactgcaacatctgttctttctccccttccttccttccttccttcctttcttttcttccgtttctcctctctctctttttctttcctaagatagagatggagtcttactatgttgcccaggctggtctttaactgctgagctcaagtgatcctcctgcctcggcctcccaaagtgctgagattacaggcatgagccaccacccgcaacctgcagtgtctttaaaaggaactggaaaccttcggtcatgtggcataaccctctttattactatctctcgttgttagaagggagtttgcatcaatacatctcatctagggtcctcagggaaagtatttaaccttagggtattcctttccactgctttaaatatcacaggatccaaggctgtggagaaaggagcctatatgatccagaccaactccactttgggcccttagctacctctaatctaattattagtagaagtggtatagggcactccctatagcattttctggtgtctagggataggtgacctaaagaagtccattaaaaacatctcaatccttattcaacaaccacagaaagctacagtcaatactctggatgctcaacagacagccttgaactccctacttcagtgctgcaaaaccgaacgaccctagatgtactcacagcagaggcaggggcacatgtaccatgttaagagaggaatattgcttctatataaatacctcaggccaagttgaagaaaacttagaaatctgttatcaaaatatagctatactggacaagacaaagggagacccctcttcacccatcctaggcaggatagctaatgattaattagggtggttgggaccatgactaagccccattgtctcagtaattgttcacagcagtaacccttttaatttttggtccctgacttctgaactctgtcaccaagtttgttgcaaaaagcctaaaagccataaacattcaaatgttgggctactcaggggtaccaacagctaagcctatagccaggagagaatcaaacctatctgaaaatgaccaggaagagtttcactcctttaacaggatgcttgcctatgcccaaactcagcataaagaagctacagaaaatagactttgcccttcagcacccctcaagaatgaggcgtgaacatttaaaaagggaatttgttgcccttgcaatgcctacatgacttagctggacccctattctgcttttgttgcccaatgcaaggcatatgtgatatacgaagtaaattcctactcagcttaactctgcttaattttgggaaacaggatgtctgtgatcatagatttcttcttaggcagcttattcatcccctgaaaaacctctagcttcattctaatccagtttccatgctaaatgacattcgcacttgcaccatgacagttgacaatcaccatgataatgactggaagagactgaaaaaggacaaaaaagaggaggctccttgattccaagaaaatcttcgtcccttctcaagaaaaagcaggaatattccttcccttgctcttaatgcccacccctttactaagtaagataccgtacatctgtgacttcccagttctcaggggctggaaagttatttgcaagctatactcccacttctccaactccacggtcattagataaagcctacactgcttgacacttggttttgtgtattggtttctggacaccacacagaaaagagcccctttaggagtaactgggacccccagtaacaatatagcagaaaggaagactaaagtctgtccagaaatctgaacagatttttgtcaaaaaccattgtccactctgcgggcccaacagactttgccccacaccactgtatgttcttcaaacccattggattctccctagaaattatttattgcccctcaacagaattcctcttcatcctgcttccacaacctgttttgccaggatcctagcccccattctttctgtaacctcaagatgatatacaagtctctatactcattgaggggttgagccttcattctgaaggctcctgtacatacacattaagtaaatttgtatgccttttctccaactaatttgccttttgtgagtcactttttcagtgaaacttcagagggccaaaagaaaagccttggtccccacactcgcaaatagcaagcggcataactccttccagcattactttcataaagtcaaaatgtttttcttcatgaagtatttattttataatttctatagtctgagaagtagttcactattttctctattatcgtgcacaacacagcagttatgaacagaaacttcagtatgagacacatctggctttaaatatcagcaatctgttcatctctaagtgacctgggccggatacttaatttctctgagcctcatctgtgggataagtgtaacccaggatccccaggtcactgcagaaaaactacccacttgtaactgttgcaccttgagtttttgttatttcaaaaagtttccaggaacaaccccagcccctgcaaaacaaaaaccaattggatccagagatgcctgagttggagaagaacttttttgaactttccatattaccatactaaaaccaagacgggagcctattcgtcattttttgtatatgtgatgtatgaagaaacatgatcaacggctgcacctgcgctgactttatcccacttttacatacaatgactcagctgaacagcacaataaaggccccactttcacctttgttccaggaggcactgctttgggaactactccaatgttctctttacttgttgcaagtaatcaaatacctttgttaaatcctccgtggttgcagtcattggactgacacctgccaagcgatggaacctgtcgtgtgggtaatgtaagctcagcactaactgtttaaaagtgatgttctgaggattaaatgagatcatgcatatataaaacacaagtatagtggctgtaaaaaagccaataattagcagttgataaaaattagtttcattctcatcccctacaccgtctgttacctgcattaaattgcaatgatctgcctgtattaaggccctcatttgaacaaatcaattataaaaatacatttttgagacaattggggaaacttgtgtaagactgggtttagacgatttgaagaaaatgcagtattaattttactaaacatgataaaagcactgtggttatgaaaaaaagcttaccagagattcattctaaaatgcttatgtgtgaggctgggcacaatggctcacacctgtaatctcaatgtttctggaggccaaggcagaggcctcttgaggccaggagttcaagacaagcctgggcaagaccctgtctctacaaaataaaaataaaaattagccgggttggtggtgtgccttgtagtcccaactacttaggaggctgagaagattgcttgagcccaagagttcggggctgcagtaacctatgattgtgccactgtactacagcctgggtgacagacagagcaagaccctgtcacaaaaacaaacaacaaacacacacacacacacaaatgcacagaaaatgcttagaggtgaaaatgtatggcatgtgggaagaaaagggaggttacagagacagaacactttccatctggcaaaatgttaaaattgctgaagttgtgaatgggcacatgagggcttcttttgttttttgtttgtttgtttgttttgcttatttatttttctttttgtattagggcttctttatactgtttttttttttttttttttttttgagatggagtctcactttgtcacccaggctggagtgcagtggcgcgatcttggctcactacaacctcagcctctccggctcaagcaattctcctgcctcagcctcccaagtagctaggattacaggtgcatgccaccacaccgggctaatttttttatttttagtagagacggggtttcgccatgttggccaggctggtctcaaactcctgagctcaggtgatccgcctacctccgcctcccaaagtgttgggattacaggcgtgagccactgcaccactgagcctggcctttttttttttttttttttttttttagatggagtctgactctgttgcccaggtgggagtgtagtggcacgatctcggctcactgcaacctctgcctcccggttcaagcaattcttcctgcctcagcctcctgagtagctgagattacaggcactcgcaaccacacccagctaattttttttgtatttttagtagagacggggttccaccatgttggccaagctggtcttgaactcctgacctcaggtgatccgcctgcctcggcctcccaaagtgctgggattacaggcatgagccaccgtgctcggcctggtcttttttttttgaaatagggtctcgctctgttgcccaggctggagtgcagtgatgccatctgggctcactgcaacctctgcctcccaagtagtgagattacaggcatgcgccatcatgcctagctaatttttgtatttttggtagaaatggggtttcactatcttggccaggctggtctggaactcctgacctcaggtgatccacccacctcagcctcccaaagtgctgagattacaagcgtgagccaccacactcggccttatactatattctctacttctgtgtttctcgaaaatttccataatataaagttttaaaatcgaattttaaaatgacatgaaaacgctcttagtacattgttgaaccatacaaagacaggtcacaaagtattaagaattcatttaggaataaaagtacatcattcacaaatccattccacaagtatttaccaaatgcctactatgtgtcaggcactgttcaaagagaacggtgttcagactgggtgcagtggctcacatctgtaatcctaacactttgggaggccgaggtgggaggatcacctgagcccaggcatttgagatcagcctgggcaacacagtgggaccctgtctctacaaaaaagaaaaaagaaaaaaggccaggggttgtggcgcatgcctgtagtcccagcttactcaggaagctgaggtgggaggatcgcttgagcacaggaggtcaaggctacagtgagccgtgatggagccacaacattgcagcctgggcaacagaacaagactctatttcaaaaaaaatattgggggttgggggagaaagacgattgttctgcagaaatgtcagtctcagctcccaggatgttaattttcaaccgacagggaaagttagagcacttctgaaagctcatgcatccatcaaatgtggaacgtctttaaactccatttatatttgtttcaaaaatagactgtacctgaggccaatttgtggaatttgagaagtttgacttcacgatatccagtctcctcttggtactcagtttcacatacccaggacctgctgactttttaacactatcccttatcagataaattctgcaaggcaaggcccttatctgtttcacatttgcatacttgaagtaatgaagttcatgcctgaaagacaagctgtagacgaccaaaccattggttgcataaggagagaaagagagagaagagaggaagaaattatcattattgtttacctttgacttaaaaattcatttgctctaactcattttacattgcatctgatgtctttcatttctaattgtggaataaaaggctatctccctcattaaatagacttcaggcaatagcaagcaggttagaaacatattttcgggtataagggagtctcctctctcctaaaccatgccttagagttaataatgatttttaacattttctctggggtgtggagagcaatatctgtttctctccatgtccttccccaccttcatagtcagcaagatgattaagctgttctgatccacaaaatgcggaacctcagacctaactaatagagtcctccctctgatcagtggcaaagagtagccattatcattttttaatggtaataatatttattactttttaaacttattttttaatggtaataacatttatattatactgggtgtctgtatattgagttgccattccaaaggactatataaaaaatatatatctaaatgcttgacaaaaaaaaaatgcaatttttttggaaaggaatatatttggtggctgcctcatgcagcttaagtgtccaaaatctgatagattggtgtatcccagtggtagttttctgttgccacaaactccaatcagcaggaatgggggttgtaactcctgtacaatagttctaccttatccacagttctgttttctgcagtttgagttgctcctggtcaaccttggtctgaaaatattaaatgaaaaacttcagaaataaacatttcatatgttttaagttgcaactgactctgggtaggataatgaaataccaccctgtccaggatatgaatcatccctttgtcctgcttatccaagctgtgtatgctaactgcccattagtcattgacatcatctgcccctgacatccaaccacagacgttatcatggctcagtgatccaggatcacccaggcagatgatcctccttctgatgtatcatgaggtcaacagtagcctaacgttccatcacagtgcctacttcactcatctcgcttcatctcaccacttaggcattttatcacctcatcatcataagaagaagggggagtacagcacaagacgatattttgagagagagaccccattcacataacttttattacagtgtattgttataattgttctattttaagctagtgttgttaatctcttactatgcttaatttataaattcaactttaccataggtatgtctgtgataaacattgtatatatagtgtttgacacatccatagtttcaggcatccactgagggtcttggaacatgtcccccaaggataagtggggactactctagtgccatcaggctagcaggctgtaaaggttttaatggcagtccctggaccatggcttatttaattgcttccaaggcccactgctacaaagggcctcattcaaagctggtggctttgttggtcaccctgacttaggggaccaaaagaacactcaggtggggtacatgttgcctccaatgcccaagtacccaaagaggccttccagctgttgggcctcctttttattagtggatgtctccaaaattaaatttttttgcttggttgtatctagaatacttttctggcttactgcccatgtggccttcgcatttagcccagggacagtccactgttagtctccacatccgaaagcctttttgactagccaaactgagctgttacattatgacagggtagtttgtagcatttccatttgtaacaataattaacacaataatgtcctgttcttcagttagtatgcagtactgtttttttgaataacccactgggacttgggtggcttaggtggcagacaggcatggatatgccccgccgtaacggctggaattcttagctgtgagcgggcgcacccctcaggcagtgatgatgtgctgagccccaagcagccaaaatgtcaatgactataagacattcagccacaggaaccaaagtcaccggcacctcaaatggccagaggcaccccacagcagataagcaccataggtcactgcttttgtccccaagcctcttaatgtcaccagtttaatttttcccttaaggagacctggaaatattgtcacatgggttccaatatctaagaacaccagaaaaatatgaattcctttttccccctttttatcttttaaaggaatattattaattttaaaagcagggaccatgctaatcatctctatatcattccaatttcagtatatgtgctgctgaagcaagcatgtctttttttttttaatttttaaattttaaattttatgagcacatagtaagtggatatatttaataggtacgtgagacattttggtacaggacgcaatctgtaataatcacatcatggaaaatggggtatccatcctttcaagcatttatcctttgtgttaaaaacaatccaattatactcttagttattttaaaatgtacaattaagatattattgactatagtcttcctgttgtgctgtcaaacattaggtctttttcattcttctgtttttttttgtttttttttttgtttttttcttttttcagatggagttttgctcttgttgccctggctggagtgcaatggcatggtctcggctcactgcaacctgcgcctcccgggttcaagtgattctcctgtctcagcctcctgagtagctgggattataggcacacaccaccatgcctggctaacttttgtatttttagaagagacagggtttcaccatgttggccaggctgatcttcaactactgacctcaggtgatccacccgcctcagcctctcaaagtattgggattacaggcacgagccaccacatccggccctttttcattaaccatccccacctcctctcccgcttcctcccacttccactacccttccaagcctctggtaaccatccttatattctcttatctccatgagttcaattgttttgatttttagatcctgcaaataactgagaacatccaaagtttgtctttctgttcctggcttattataagaactcctgttttatcttgacaggaatatagagtgactgacctccagtggggaggaaaccagagaccgtggccccattcccaactgggccattcagcctgagacatttggatttgatagaacctctttgatagaaccatggcttattgatgaagtggaaggagtgatacccgaagtacccagcccacggtgtagacatcaacctacaggggtgcggaagctggacacaccacccagcctgcacaagatttagctggctattctccatttttattctttggataatgagtttctgctctgtaaatgcccttatgaactgtgtttggttccctctcagatgcctcagggaccaccagaggacctcttcctcttccctctcagggttctcagggatcaactgagtatccatttcctgagttctctagctctcgggaatgaacaaccatacaagtgtccaacaatcagagggtggcttgccactgtcctattctatatttctttctctctgccccagtcagtgcagccagctcactcatatccgcagggttgggggtgacctatgtcctgtttacaaaaagagtcaaactgtaaaacatttgaagagatttattctcagccaaatatgagtgaccaatggcctgtgacacagccctcaggagatcctgaaaacatgtgcccaaggtgatcggggcacagccaggttttatagagtttagggaggcatgagacatcaatcaaacacatgtaaaaaattcattggttgggtctggaaaggcaggacaactcgaagctgagaaagggtggtggggtgagggtgtggcttcctggttataggtagatttaaaattttgtgattggcaactggttgaaagagttattatcaataggaaggaatgtctgggttataatgataaggggttgtggagaacaaagctttattatgcagatgaagccttcaggtagcaggcttcagagagaatagattgtaaatatttcttgtcagacttgaggtatgtgttgatgttaatgctggtcagcttttcctgaaagccaaacttgagtggggtataattggcccttctttcctgtcatgacctgaaccagataatcaggtaaactttggaatgccctggccaagaggaaaggtccattcagatggtgagaaggccttcaaattttattgttggcttataatctcacctctcattcttccttttataaatcatctggctgcttgtccagctcctgcacacctctaggttgatgtctacaccctgggctgggtacttcggggtatcattccttccacttcatcaataagccatggttctatcaaagagggccctgctcacttcaccaattttgtgaaccagattcaccatgcactggtgaattttgtgaacctgcctgagcctggtgagacagaagacactcacatgcaacaagttacatgaagcaaatgtattacttacagataggaagcaagagacaacagaagactagaattcattatgtgccagtttcccaaggcttatgaaagctgccttgggtggatggagcttcaattgcacatggcctactgttgttgcagctgaggggccccaaaagcagcttaccccaggctcagtacctcaggggccacaggaatcactgggtaaatctcatcctactttcagggagagaggaacaaggctctggttgtcctagcagttcctccttaattcaatatgttacattctttaggagagccaggagccaggcccaggctgtttcaggcagttcctccctgcctcaggatatgggcattcccacacactctacagttgttcttcagactacaagcaagaaatggaggagaactgggtcagtgcctggccacttggagaacagttctgcagaaagaagtcacacctgtgaaaactgcctgccaagaggaaacaactacattgacatgtatgtgagcaagaaatcaattgctatttggttaagccattgaaactttctatttttctttctttttttttttcttttttttgagaaagggtatcactgtagctcaggttgtagtacagtggcatgttaatggcttactgcagccttgacctcccagatccaagcaatccttttgagtatctagaaccacaggtgcacactaccatgcccagctaaattttaaactctctaaagagacagggtctccctatgtggcccaggcttgtctcaaacttttaggctcaggtgatccttccacctctcgacatcccatagtgctgggattacaggagtgagccgtcttccctggcctgaaacttttacatatatttgttacagcagttgacactactctaagcaggatatataccttgcatgttcaataaagaatatatagaaatagcaacagttttcaggggaacattgtctttgaggatgaaactctgactttttttcttatcttggccaaactcctccctaagggaccttgggagtcacccctacaaaccataaagtttcatcagaggggttttatttaaccctatgtgacgtggtttgctttccaacctggctctggcatgacctcacataataaataaggaaagaaatgaaaatattttagccccaaatatatttccttgtcttgaaatgaccctgcaaagttgtctctctcttgtgggaataaaatctacatctttttttttttttttttttttttttttgaggcgaagtttcgctgttgttgcccgggctggagtgcaatggcgtgatctcggctcactgcaacctctgcctcccaggttcaagcgattctcctatctcagcctcccgagtagctgggattacaggcacatgccaccacacctggctaatttttttggtatttttagtagagacggagtttcatcatattgttcaggcaggtcttgaactcctgacctcaggtgatccacccacctcagcctcttaaagtgatgggattacaggcgtgagccaacgtgcccagcccgttcttttcctttttttttttttttttttttttttgagatagagtcttgctttttttcccaggctgcactgcagtagcgtgatcttggctcactacaacttctgtctccaggttcaagtgatcctcctgcctcagcttccagagtagctggcgtgcacctccacacgcagctaatttttctatctttatttatttatttattctgagacgaagtttggttcttgttgcccaggctgcagtgcagtagtgtggtctcagctcactgcaaactctacctcctgagttcatgtgattctcctgccttagcctcctgagtagttggggttacaggcatgagccaccatacctagctaatttttgtgtatttttagtagagatggggtttcaccatgttggccaggctggtctcgaactcctgacctcaggttatccactcgccttgacctcccaaagcacttggattacaggaatgagcaaccgcagctggccaacttttgtatttttagtagaaatggggtttcaccatgttggccaggctggtcttgaactcctgacctcaaataatcagtctgtcttggcctcccaaagtgctgggattacagacatgagccatctcgcccggccaaaactttttttttttttttttttgagacaaagtctcactctgtcacccaggctagagtgtaatggtatgattatggctcactgcagccttgaactcccaggctccgcttcccaagtagctgggactacaggtgcatgccaccacgcctggctaatttttgtatttttgtagagattgggttttgccatgttgcctaggctggtgttgaaatcctgggctcaagtgatccactgtgcttggctttttttttcttttttttttttgagaccgagtctcgctctgtcacccagattggagtgcagtgactcgatcttggctcactgcaacctccgctcggctgggtgcggtggctcacgcctgtaatctcagcacttcaggaggccgaggcgggcggatcaccagaggtcaggagctcaagaccagcctgggcaacatggtgaaaccccgtctctacaggaaatacaaaaattagccaagagtggtggcgggcgcctgtaatcccagctactcaggaggctgaggcaggagaatcattggaacttgggaggcggaggttgcagtgaactgagattgcacccatgcactccatcctgggcgacagagatagactccctttcaaagaaaataataataataataataatgttttcatgatgctttgttgatatctccttcatcttaacatatccagaggctgctggccatagtcacgtgtgaatcttgggaataaagtaatagaaccatgggaagcactcgctatgtctattgacttatgtgctcacaactacacagataataattgggggcatatttaatccacatctctcaactgaatgacagttgtcagaggccagtgatctgctattgctgttcatcgtgccttccagctgcctccacattctaaggcaactacaacatgtgagaagaaatcgataggtcaccaaagtgtggtatcatatgttctatattatagagcacatatgatttaataacaacaaaaagctttctaggccaaatgcagtggctcacacctgtaatcccagcactttgggaggcctaggcaggaggatcacttgagcccaggacctcgagaccagcctaggcaacatagtgagactctgtctctattaaaaaaaaaaaaaaaaaaaaaaaaaaaaagctttctaagcacatccgagaactgtagaaatcactgtggtctaaccacctcatttataaatgaaaccattgatattcagagaggaagtgatttgcctatggctacccaggttttgtcctgggatgacgatttaatccttaaaatagtaatctgtttatgagttttctgattttaaaagtaatttgtttttattctggaaaatgagaaaaataaggaacttttttggaggttctaacaagggggtgagtgcagctactcatatatccttaaatgatccggctgggcgtggtggcttatgcttgtaatcctagcactttgggagcccaaggtgggcggatcacttgatgtcaggagttcaagaccagcctggccaatgtgacgaaacctcacattgtgagggggcctggggctaagcaatagaaaaaatttgctgctgagcattaggaagtttctccctctcaaaactgtgtgctcaaagaggatgacctttcccaatagaggaggctcattcttattttttaattaattaattaatttattattattattattttgagatagagtctcactctgtcacccaggctggagtacacccaggctcactgcaacctccgcctcccaggttcaagcaattctcctgcctcagcctcccaagtagctgggactacagacatgtaccaccacacccagctaattttagtatatttagtagagacggggtttcaccacatgggtcaggctggtctcgaactcctgacctcgtgatccacccgccttggcctcccaaagtgctgggattacaggcatgagccaccacgcccagcctctttcttcttttattgcagacctctgggattcagtttaccatggcccttctctcaacagcagccaccagcaaaccacttaaccccttgggctcctgcttcccttcaaccaagagcaacaatcatccttttcttttcttttttcttttttgagacaaggtctcaccctgtcacctaggctagagtgtagtggcatgatctcagctcactgcagcctctgcctacggggttaaagcgattctcccacctcagcctcccgagtagctgggactacaggcatgtgcccccacggccagttaatttttgtattttttggtagaaatggggtttcaccatgttggccaggctggcctcgaactcttgacctcaagtgatccgcctgcctcggcctctcgaagtgctgggattacagaaatgagccaccacgcctggacagaaatgttaaaattttaaaaaattattttaatgccaatttaaatctaaaaattgtaacctaagcagactctatatcatctggttcacatctttataatcaactgttgtggagtggttccagtttccaaggaaactactgtttatcatatcagtgaccaatgacttccctaataacaaattttaacttttaatgctgcattttttaactagttcccatctctttcagtagttagaagacatattttcagatgtattataaaaattagtttttgtctaaacaagttttttacataactctgctgaagaaactctggcctgaaagatgaagtccagctttcttggacttttttttttctttttctttttctttttcttttttttttttcgaaacggagtctcgctcactctgtagcccaggctggagtgcagtggtgcgacctcagctcactgcaacctctccctcctgggttcaagcaattctcctgcctcagcctcccgagtagctggagctacaggcacccaccaccacacctggctaatttttgtatttttagtagagacggggtttcaccatattggccaggctggtctcgaactcctgaccttgtgatccgcccaccttggcctcccaaagtgctcggattgcaggcgtgggccaccgcgcccggcctccttggactttttatctgcattgcaggcactcagtggtccaggccacctacttctgctctacctttggacatcctggcaatgtgctgctcctcagcctgaccacaacacctgcagtgtcccaaacatatcatgcagtttcatgcctctgcacccatttcctctccctggtcaacacacctgggtgacccctattctactcactcagacaaaccaggacaggatccttgacctttctgcaactctatttttctcacctagaaatagaattaatgacatctacttctttagcagatgtttaggaatgagatacggtgtggagagcacctggtgcgaacacagcgcgtatctgtgatagtgaccgttagccgttatcctcatcaccacatcctttccccacatctcagatggtgccacagtctaccacctcagagagaaaatagaaaagggaggtcccaaacttcctgctccaccacctatacctgtccctcatgatctgtttcctctgatttcaacaagcaggtgttctttctcctgtctcaggctaattctgcacccacatcggggagcccccaccccagcttccctcaggcttctctatttggtcaattcattaattcattcatttgacaaggatccatgaacgctaactatgtgccagtcactattctaggtggtggagtcacagaagtgaacaaaacagaaagttctcattcaaaaacaacataacttgtggtaggaggcagacaggaaatgaaataattagtaatatatatggtgtgctggatgatgataagtgctcaggagagaaataaacctggaatagcagaacttgcatttctttttgaaggggtcttgctctgttgttcaggctagagtacattggagtgatcatagctcactgcagcctaattttttttttttttgaaagacagagatcttgctatgcatactgcccaggttcttgaactcctggcctcatgcaattctcctccctcgatctttcaaggtcctgtgattacacctgtaagccctcgttcccggttggaagttacagtttaaaatagggtggttatgagcaaggggagcgaggcacagaatacttgggagaaaagcattccgagttgagagaacagcagtgccagagcacagaggcagaagcactgtggtttgtgtgaagaaaagcaatgaggctggggtgcgcagagcacacagggtgatcaggagaagaggaggtgacaaggccagagggggttgagggccagatcatgtatggccttgaaagtcatcatgctgacctgggctttacctctgagaggggagccactggaaggttagagcagaaaaaggactggactgacttatgttttaagaagttacttcacatgctagaccaagatgggctgtgggtaggggtggtggatggaggcctgaagacccagctgggagctactgcagtgatccaggggaaagatgcagatgacttgtaccagggaggagccatgaaaatgttatgatgctggatttattttcaagatagaataaaaaggctttgctgataaacttacaggtggggtgtgaaaaaggagggcatcaagggtgaccacaaggttttggtcctaagaaacggtacagatggagttgccacttactgagatggggaaaatgagggagaaaccgcttgtggaggccagaggaggagccagcacagaatccaaaggtcagttttgaatatgttgggtttgaggagcttactagagattcccgtggagatgtagagtaggcaggtcaataataagcttgcagtccaggcaacgggtcagggctggaaacacaagttattctctttgtcttctttatattcatgtttgttgccactgtgtgtttcacttacctaatgcattcgtgatttattgctgcataacaaattaccacaaacttagtggtttaaaacagtacacttttccagcctgggcaacatgatgaaaccccatctctactgaaaacgcaaaaaataaaagataaaaaattagcccagcgtggtggcacacacctataatccccgctacttggtaggctgaggcacaagaattgctagaacccaggaagtggaggttgcagtgagccaagattgtgccactgcactccagcctgggcaacacagcgagactctgcctcaaaaataaataaataaataacagtacacttttatcacttcagtttctgtgggtcagaagtccaggcagagcttagtgggcttctctgctcagaacttcacaaagcaaaagtattattcatgcatgtaaacctctaagcacaataccaacatcacggtaggttctatgtgagtataagctattattaagaataataatcaatcctcttccctctcctccatccctaaggcctcatcatttcttgcctggagtgtcacagtagctttcttcctggtctccttgtcttctaccatctgattctctaatgaggactggctatattgtgtaatcatagcgtcatcattccacagaatacaatgtaaatggcactcttacttcccatcttccctggcacctttcacactattgtttccaatgtacacattttctcatgccatttttaaaaaagattttctcttcaccttcaaactaaaactccaactccacaacaggcaccagctgataccgaacctttcataatggaaaataatgacattcataaagagttaatatgtgcaggtgctgtgctaggttctccccaaacaacttaagaagcaggtcacatccctacccatagctgaagaaacaaagacattgagtgagaaatgaacttaggggtctcatagtttggaaactacaaagttcagagatatgaagagttgggctcagaaactcctaatctgaagcttagcacattggctgcttctttgtgtcaaagtgacttggaccctccaggcaaaggtgggatgttcattcttactaatacgatctcaagcagcacagcttctgatagagtctgaatttaaaaataaacaaatgaacaaataaacaaatattgatggatgaataggggtgaacagcaggatggatttataataaagtaagaaactaaaatattaattatacaatctacatggtagatatattggaatttactgaaattctttcacctttgctatatgttttagaagttttataataaactgttggggagggggaagggggagggaaaaattgtgtttttctgttgataacagagaccagaagtaccactggcttaaataaaacaaggatttgttttcctttcatgaaaaacaaacttatttggaaatttaccctgagtactaatatataataaaatattttaaaagaaaaaattttttaaataaatttagatggtgacagtccagggctgatctggcacctcagatatgtcattcatgccccagcctgcttctgacttcattctctgctgtcccagtgtgtggcttccaacctcaaggctgcctcatggtcccagggtgggctactgcacctccgggtccaaagtccatgttctaggcaagaggaagaaggaagaagggagagtgtaccctcacactcccagctattttggcctccctttgaaggatttctgggagaagtacaagcccacaactttcacctacaaaccgctggctccaacttagtcccttggcctgccctatcttcaagggggaagagcaggatgcagtaccccagaaaattaggccttgtcactaagaagaagggggcatgcacgctgcagaagcaaccagccatctcaagcagataccacacagcctaaattcaaactgttgcaatataatcaaatcccatcagctccagtcacatattagctctaggagatttctggcttgcagcccaaaaaagtgtgttttgaggtcgtaagccacagggagaacaagattgtcccataaactccttacagagatggtgtacaggaaacgagccttacagagaccacagcctatggagtgtctagcttcagagaatatgtactccactggcagcgtgagaaacaaatacccaagaaaatacaatatagcacaaaccaggagctgagggtgaatgaagatgctcagaaagatctgcagtaagaatttcctgggaaaggtaaaacaatgtcaagcagcactgcctctggaaatcagaaaaattatattatttgataccatatcctaagcctaaatgccagaagttcttaaagaggtgcagtttgtctcattttctttccattcatacctttattaggctctgtaaaaaagatcctcctcttctacgtacctatctacatgcaagcaaactgccacagaagcatcttaattagtgcacatcttcctctctttgcacattaaatttttttactttcctactccattctgctaatatttctattaccatgtaaaagacacgagacaggtgaatataaagaaatacttatatacatccacgcacaagaatgattcaaatagataaacacagaaacacaaacactaagggaggtagggctggagtttttcctcaacgtgtacaattcaatgtactttcagttttcatttcaacgttcctcagtggtttctgcccagcaactgatgagaaacatcacctctgagccaatcaaaaaactaattcttccaaagagcgactcttactgtttctcatggtgagaagacaatatttgctttctctttttcctttcttccggatgagaggctaagccataatagaaagaatggagaattattgattgaccgtctttattctgtgggctctgattctccaatgggaataccaaggggtaagtgcaggaaattgattagagcctgggctacaacgcatgggaggagcggggctgaatcgctgagagtggtgagtgggcatgcagggagagtactctcccagagaaaggggtgcagtgcctgtgtgtgtgtgtgtgtgtgtgtgtgtgtgtgtgtgtgtgtgtacatgtgtacatgtgcacactcgcacatgcacatatgggcacgtgggaagacgggagaagtactgcaaagtataaggaactgcagaggttgggatttagtggaaggaaagggagacaacatgaatgaagaaatattccaactgcatgttcttaacgtattgtggtcagaaaagggcaaacaaacaaacaaacaaaaaacccttaaaatctgttctggccaactcaaggcatctattctgagaaattctgaagaagaagaagaaaaaagagatgtgcctcatagatttatatgtaaatgtgtttattacagaagtatttataatatagtaaaatctgaaccaacatacatattcaacaggtggggaatagacaaacaatgcatggttcagtcataaaacatgttccatgtaaccattaggaatcataattttaattaagtgaaattctttataattttaataacactggatccttatattaaaccatttttggtatcttttagggatagtacttggttttctttccattcatcatttccccaaaacctaaagcatgatttcccatggttacaagctactacattgtatgaatatataattattgggagtctctgtgagcctactctgactcagaaagccgctcctaaagaagaaaaaagaacaaacaaacaaataaaaaacccgaattatttttaaaactctttattttggatttttcagtttctacattttgttactgtagattttactagattgaacagccttatccataaatatttgcatcaatctctaaatttttttcttcaacactaacttttatagttggaattttgggggcaaataatacaacattttaaaggcacttgccatgtgtacatggccaaatgcttccagaaacatttccacttccattagcaaagtatataactacagagtatttaaggttttattcctttatatttttttctttggcaaaattgtctatagtagaaagaatgaataataaataacctaaaaaataaaagttctccctctgaggacagcagagaaatttttagcttagcttaataatacctccttctccttaggagaataaagagcagtttcgaggagcagaagatgtggtgaaatataatgtttagtctgatggtggatgcaagatccaggcaggggtggagcatgaccagctgcacagacctctgttcccttgcttcctctacatctctccccacctccatctgcagaccttgttctcagaggccattcccagacccacagcagctggtatgatggctgcaggcctcatgctcctttgttttgggagaaactgttgaggagttagtatttactgagcagctaatatgttccagtcactattattcctcataataattagttattaactaatacatgaaaattttaaacttaaagcattccaataattttaaaagtaaaggaagcaaaaggccaaagcgtcctttcactcacttaacctccaattttcagtttagcatccatcattttagactttttcaggcatttacatatatagttatgcagaaatgtatagctttgcttttgtttttcaattgaatcattagtatagttctgcaaggtgctttttaatcacttagtatatctccattatccaggctagtgacattaaatcactctttttaactgctgcattgaatttcctcctagggatgagccatcattcctctaaccagtctcttgtgagtggctggttcagttggtaaccacttttatactttaaaaatagtgctgcagtgtcattcccacagaggcttctctctgcacccatgcgagtacttcgctgaagtaaccatcaggaagtggaattgctgggccaattgtgaacattctaagtctcatactcgatatttttgagtaactaaagttgaaatggttttgtcccatgactgagatcatcaagcttgtgacttgtagagcctttacctattgtctaccctctttgtgttcctaactctaccatagtgggtccagcccattgtgggtgctcagtaaatatttgttgaataactttatgaagggaagaaagaaaagatgagtaaagcctggtcttattcaaagctctcctaatcaatatctttgtgattaaacgtggtgggttcagcccctgactgacttcagagcctctgccaggcagtctgcctggatcccaccaggagccaccaggccataagttgactgtagtaatggccaagagtttgacgcttgaggagtccatagtgttggacacccacagagctgaacaagggtgggaccagggaatccagtgaagagggtccttcatgaatcagagggggatgatggaagcttggacctggcaagggaagtgtggggaagtgataggattatgaatattttaatattttaatgcagtagagtcagagatgtcctgatcagataacagatattatttttacagatggttttccatactggaacccaaaggtaaagacactcaaggacagacatttttggcagaggtaagatcttcttcggtcaccatatttgagttagccctggggaagtggacatttccatgcagaatcctaaagcttcttccaggccatagtgtctgtcccacaccttctggtatctcttgatatgcagcatagatgaaaatggcaagttccctggctttccttctgctcaactttcatgtctccctcctcttggtccagctgctcactccttgctcaggtagggaatgattccatgattccacatttatgtttctgaagcagacaattatctcaattacctaattaagcagacaattacctaaatgccctcttagaacctttaactcattcccatacctggaagtccatcccaacctgaaggatcacctgtcacaaagagacaaatggtccttctgttaggattgtgttcccctctaggttctctgtatctcgccttccctgtctgagaaggacccttcctctcatgaccccaactccaaaaccctctgatggagcttcccccttgtgctgacagctcagttttctgtgcttggaccctctgggcccatcctggccatggtgggtgaagacgctgatctgccctgtcacctgttcccgaccatgagtgcagagaccatggagctgaagtgggtaagttccagcctaaggcaggtggtgaacgtgtatgcagatggaaaggaagtggaagacaggcagagtgcaccgtatcgagggagaacttcgattctgcgggatggcatcactgcagggaaggctgctctccgaatacacaacgtcacagcctctgacagtggaaagtacttgtgttatttccaagatggtgacttctatgaaaaagccctggtggagctgaaggttgcaggtgagcctccaggttttgttctgagaacatttctctgtaggatctagagcagatgcagagtccctcttgcaaaagcactgcagacactcctggctgctcactagcaattgcctgcactgcctcccaacttagcttctctgaggcccttgagtaagacacaggttttcctttaggaagaattcctgctgtaccctacatgctcaagtaaagaactcctttcctctggccaccagagatataagcgaagtgaaggacgagggataggaagcataagaaaccatctcttcagtgactggtacacagtcattttggtttagttgtgtaacagatggcttctgttgtgtctccaagtgcacactaccatgggtcctgggaggtggaatagtgactgtatctgctgccagtgttctccaactagccatccccaggaatactcctgtagtagaactagctgtatttcttacgtgttgcagtgaggaagaacacacatcatggggagctgtggcggggtctcagtaagaaggtgttagagcagacttggtatacaatttgggcttgtgttaggggattggggccgggggagttcatagacttagccctctgctctggatgagattccatcaggaaggtgtgggcaggttaattctgagtgagagccttaatcaatcttatgtaggaagaaggagaccagggtgagacaaaagctgtaattgatgaaggggcagcaatccctcattgctgaggggggatgtttggtcactgctgtggtttggacaatgttcatgtttttctctatgctcacatatgatgtggggtggtattgtttttcccatgatccatcatagtcacaaagtgccattgtctgtgttctgtgaaattgcttatgttcaacaggatgacacagagacccggtgtcagtttccatatgttgggacagcttttctctttctcagtgcaatcccttgccctgtggctgctggttaggtttggtttaaggggatctctagcagacaatcataggaggaagagaaaaggaagaagtctgggtgcttattcactggcttccttactgcaagttaccctcaggctggctgcattgccttgctgaaggtaacagctcctctaaaggaagtcctcaatgcatgaatctcttcttttttgtgttcaaaacagcttcctctcctcctccctctggtaattggggtgggtgggaatagccccactgtttctgaccctgggatactgcactagcaaatttagttttcccctcatcatgaccacacttttgtaaacagctcctgaatgaaatatctcttgaattatcaaatctgagcctgacattgattcccattgagaccctccctaatacaggagctatccagaatttaggccaaattatccttccacagcactgggttctaatcttcacgtcgaagtgaagggttatgaggatggagggatccatctggagtgcaggtccaccggctggtacccccaaccccaaatacagtggagcaacgccaagggagagaacatcccagctgtggaagcacctgtggttgcagatggagtgggcctatatgaagtagcagcatctgtgatcatgagaggcggctccggggagggtgtatcctgcatcatcagaaattccctcctcggcctggaaaagacagccagcatttccatcgcaggtcagtacctgcttggcctcaggttttctgagctgagctgtggcagttgaatgaagggggatgtgttaatatctgtggtcgacctgggtctctgcactgaatataaggcccaaagcacagacctggaggctcctctttgtgccaggggagcttctttcctccataaaggtgttcgtaacacaaacattttctgaacatttcctatctgccagaaagtatgacaggcaatgggaattggaggaaaaacattaagataagctccttatataatgtgaaatgacaaaatggttatatatatatatttacaaactcatatcatagagaaagagctgatctccttgaatcagaaggagattctaaaaacctagtaaaaagttttggccaggcatggtggctcacgcctgtaatcccagcactttgggaggccgaggcaggcagatcattgaggccaggagtttgagacctgcctggccatggtgaaactccatctcttctaaaaattcaaaaaattagccaggtgtggtggagtgcacctctaatcccagctactcaggaggctgaggcacgagaatcacttgaacccaggaggcagacgttgcagtgagtgagagcagaccactgcactccagccaggattacagagcgagactctgtctcaaaaaataaataaaataaaataaaatagaaaccaagtaaaaaaaatgttaacaaagcccatgaattatcaattcacagaaaaggaaataactcacaaaagggtgctcattctcactcactgggtaaacatatgaaataatttttcacttatgatatttgcaaaaatcaaaactgctttggcttataatacatgattctcataggaatgtaggaaggcagtgactctcagtcatttgctcatgtaacttcctgtatttttgatgtgcattaggtcaacctctgttgggggctctatagcaatatctatccaaactacacacttatcgatccaaacttccacttctaggaatttatctgatagataagcttgcatttgtatgagatgatccatgtgaaaggtttctgtttttcgttgtgtgtgtgtcttttttttttttagacaaagtctcactctattgcccaggcttgagtgcagtggtgcaatctcagctcgctgcagcctctgcctcccaggttcaagtgatcctcctgcctcaatctcccaagtagctgagattacaagcatgtgccaccacacccagctaatttttgtatttttagtagagacaaggttttaccatgttggccaggctggtctcaaactcctgacctcaagtgatccacccgcctcagcctcctaaagtgctgggattacaggcgtgagccactgcaaccggcctgtaaaaggtttcttatagcactgattactattgcacaaggttagaaactgtgcagatgttcactgccagggaacttccatacaagggaatactgcacagtttgtaaaaggaaaaagaagcaattctctctatactaatatggaaagatctccaagatacactttacacagaaaaagcaagatgcagagggacgtgtatagaatgctatttttagtttaaacaagaggaaaaataagaatatattttaatttacttttttttagttctcaattgggttagtttacatttttaaacttcaacaagcaattttgtaacacttactgtacatcaggcactttataagtattaattcaattcttctaacctcaggaaataggtattatcattaccctcattttacattagtagattaggccactacaaacagagaggttatgtaagtagtccaacatcacactgctagtcacatgggggagccagcattgaaacccataccctctgactccacaggttatgttcctaagcatcatattaagtggactaagaagttaatacatggagggagggaggacagggtgaatgagagagttgcgtgactttatgtgtatgtagttttgaacgatgtaaatgtgttacctattgaaaaaatatttagaaaaaatgtgtatgactttgctcaagttactttccatgtgagaggcagacatctcaagataagtaatagtagtagcttgtagtgagggtttaccaaagtcttatctatagtcctctgagactttagggagagaatccttatttaacctcatgagatagattccccacccccgacctgagctgagcagctaaagcttggggtgctgcaggctggggaggctgagcgcaccagcgcccatgacctacagctctccccttcgcagaccccttcttcaggagcgcccagccctggatcgcagccctggcagggaccctgcctatcttgctgctgcttctcgccggagccagttacttcttgtggagacaacagaaggaaataactgctctgtccagtgagatagaaagtgagcaagagatgaaagaaatgggatatgctgcaacagagcgggaaataagcctaagaggtatccaacgcaagcagagaatctaagctcttggcttgcatgccccagcctgaaaacctcacctctctcccctaccctggcactgcatcatgtttaaggtttatttcccgaaacaccaacctcacccataacagttcatctttttttttttttttttttttttttggttattttccagagagcctccaggaggaactcagtaagttaccattcccccagagatccagacatgtcttcctatcctcgctttgagcaccttgatgactcttccctgttcattccattgcagagaggaaaaaaatccagtacttgactcgtgagtggctttgacattttctctgaattcaaatctgttactctctctctgcttcattattttccagcccataagtcatagcccagggttgaaaagtggtcttggatccctttacccagaaaaagaaaacaagtgtggctctttggagaaaccacccagtgctttttctctctagaaaaaaaaaaaaaaaaaaaagaggtcttcaatctctttgtactaggggctacagacccttaagctctaaaaagcactgaggaatatccaggggtacacttcaaaaggaagagggaagagaaggatgaggtgcattttctatggcaggaaacttacttgttgtttcccataatctagaggctgttgaaaggaaaacaagaatggaagatttaagaaataagaaaatcagaaaagagagagggagggagaaaagtgtgtctaataaagaggagtagctacagtggctcagttggtacagatagatcataactgctttcaaaaactagtccctgaaattgctcattaaatttcccaaattctttttagagcaaggtacgaaatgatacagattgagaaggatgaatcttgtactcctaggcatacacatatagacatggtgacacctatgcccaggtacacattcaaaacagatgagctggaccccattgggaaggaactctcacagtgcctgccctgccactagcgttcaaccgatgttcccagacttgatattaagaagaggtgaagaaagaattgtacctgaagatggagaccatggggaagggtgggatggtaaaaaaaaaaaaaaaaaaaaaaaaaaaaaaaaaaaaaaagactagatggatgcaaaaagaaggggaaggggccaacacagaaaaggcagagttctggtgacacctctacctttctttcattgtaggtggagaggagtcttcgtccgataccaataagtcagcctgatgctctgtaagtttgctgggtcacatgccctgaatatttcaactttttctccactgtgacccgtggatgttctcagctggattaattagatctaatctaaagactcaatttctgtgtggtgggggttcacctccgcttttctggagcctctgagaaactcctgatcctgcacacccccttgtaaagcctggccatgcatcctgcaccccccatgacacagggagccaagcctgacatttttgagaaggtgccacctctgatccatcagagctgtagaggagggaagctggaccctggaagagactctaaagaaaaggagagaaaacatgtagtgagaggagaatggagtgggaaaagtacaaaaatactgacctttttcttatctgtgtctccttcctttcagaatggaaaaatggccctcttcaagcctggtgagtaaatcactgcatgttccctggaccaacaacctgagggactatattcctttttccttttttcttctccaactcttgtgatttggagcagaaaagttcccttgacttccttcgtgggtaggaagacgcataaagggtggaggtgaagggaaggagacacacactgagtaatactgcagggagagtgaggatggaaatgccaaggagaggaggtgatgcctgcccaaagaactttgtccttcccaggcttctcatgccacctactgcctgtatctcctcaaaggatttaatgcttccaagctttggcctccacatttttagatgatgattgcaatctgtttttcatgggggttgaggtgaagactgaaggaataatgaacatgcttggcagaaacctagcaagaaatagatggtgagctcaaactgggtagttggacaaggtttccagaaagaagggttaagggaaagcaacaaggaaaagtgcagtgcccccatggttcccaacagtggggagctgtctccacccctagcctgggagggctaaaaaggggaggcaattactggaacccagagaaagaggtagcttaacgagggagcttcctgagaagagtcctcgggccttgttagagcaccaccagctgctgctggcagggaggaagcaggaaattaaacggtgtgtatctcctttctttctccttctaatcttctatcagggcctcccattggccaaacacagcagcaaaccagaggacaagggagcccagtggcactgtccatagaggacagattcctggggtccagaagagggtggagaaagctgaaggctggagagtgaatctagggcatataaggccccacacagagcccagcacagagacggccttgcagctatcaggaagatgaggagcttccttcatggcctgctgtgggctgagtaaataatatgattgccttctacagcgctagagattcatatgtttatccccatttttcaggtgaggaaatgcttcagatgaggctccaccttgttaaataaattggatgtatggaaaaatagactgcagaaaaggggaactcatttagctcacgagtggtcgagtgaagattgaaaattaacctctgagggccagcacagcagctcatgcctgtaatcctagcactttggaaggctgaggagggcggatcacaaggtcaggagatcaagaccatcctggctaacacggtgaaaccccgtctctactaaaaatacaaaaaataaaaaattagccgggcatggtgacgggcacctgtagtcccagctactcgggaggctgaggcaggagaatggcatgaacccggaaggcagagcttgcagtgagccgagatcacgccactgcactccagcctgggagacagagcgagactctgtctcaagaaaaaaaaaaaaaaaaaaaaagaaaagaaaattaacctctgagtataaagcatcagtgggcagaatcaatgtggggagggaaacaacaaaaatgtagaaagaggatccttgttgcttcttggggccgcatcagggtattgggttaggcagatactgaccttactttcatttcccctctggtcactagacccctggggctttcaccaatgacattgatgagagaatcacattcagggcaggctagggacacggggttctggaaggacctcctcagcatggcccaagccttgcatgctgtggctcttaaatccaggaaaaatggctgaccccatggacacctcctcaaactctctgcagcagatgtaattctgtatccagacatggcaaatgccatcctccttgtttctgaggaccagaggagtgtacagcgtgctgaggagccccatgacctaccagacaaccctgagagatttgaatggcgttactgtgtgcttggctgtgaaagcttcatgtcagagagacactactgggaggtggaagtgggggacagaaaagagtggcatattggggtatgtagtaagaacgtggagaggaaaaaagtttgggtcaaaatgacaccggagaacggatactggactatgggcctgactgatgggaataagtatcgggctctcactgagcccagaaccaacctgaaacttcctgagcctcctaggaaagtgggggtcatcctggactatgagactggacatatctcgttctacaatgccacggatggatctcatatctacacatttctgcacgcctcttcctctgagcctctgtatcctgtattcagaattttgaccttggagcccactgccctgaccgtttgcccaataccaaaagtagagagttcccccgatcccgacctagtgcctgatcattccctggagataccactgaccccaggcttagctaatgaaagtggggagcctcaggctgaagtaacatctctgcttctccctgcccagcctggagctaagggtctcaccctccacaacagccagtcagaaccataaagctacaggcacacactgaagcactttactgatattcattcaattattccataggacagttgtttgagtttggtgccaccttattggcccctttatacagataaggaaactggggtgtagaaaagtgtattgactttacaaagcagacaggaatagtgaacaacagagctgggatctgaacaacaatgactaacattaatggagaatttaaaacgttctgagtgctgtgttatgagctttggtgggtgtcactcctttaatcctcacaacaccctgtcaggtagtctcatttggcaagtatggaagcagaggcagggcaacattaagtagcttacataactcacacggtaatttgtgcagttgggagatgttcagcttcagtccctggccaattgcccgttcttttccagcctgatttttcctgcatgggaagagcccacatgtagccctgaggttcccttcccaggacagctccaggatcgagatcactgtgagtggttgtggagttaagacccctatggactccttcccagctgattatcagagccttagacccagcactccttggattggctctgcagagtgtcttggttgagagaataacgttgcagttcccacagggcatgtgactttgaaagagactagaggccacactcagttaataatggggcacagatgtgttcccacccaacaaatgtgataagtgatcgtgcagccagagccagccttccttcagtcaaggtttccaggcagagcaaataccctagagattctctgtaatattggtaatttggatgaaggaagctagaagaattacagggatgtttttaatcccactatggactcagtctcctggaaaaggatctgtccactcctggtcattggtggatgttaaacccatattcctttcaactgctgcctgctagggaaaactgctcctcattatcatcactattattgctcaccactgtatcccctctactgggcaagtgcttgtcaagttctagttgttcaataaatttgttaataatgctgactcttcaacttggttttttctagactgtggtgtctactcagcacagtagagtagtctacatacccactgtactccccacagtttcagtttgcctcactgcagcattttcacaaaacccttattggatgcctcttctattgttgccatctgaattaccagaaattcatagatttaaagcaacacaaatctattatctcactgttctgtaggtgagaagtcccacagggatctcaccaggctataatcaaggtgtctgcaggctggattcctttctggagtctctaaggaagaatctatttccttgcttattcagatcgttggcagaatcagttcccttcatttacaggaatgaggtcccagttgtttcctggtttatagccagggactgtacccacttctagaggctgccacactctgactcttagctcccttcctccatcttcaaagcagcaacagtacattgagtctcctctcctagttctttttctccattgtatcattctgattcttttaccttctcctttttttccttccttttatttatttatttatttattgttgacagggattcgctctgtcacccaggatgaagtgcagtggcgtgatctcggctcactgcaaactgtcccctgggctcaagcaatccacccacttccgcttcccaagtagctgagaccacaggcccacatcaccatgccccggtattttttttgtagagacagggtcttgccatgttgcccaggctggtctcaaactcctgagctcaagaaatctgtccaccttggtctcccaaagtgctgggattataggcatgagccacggcactcagtctgccttttacttttaaagactcctgtgatttgactgagtccaacagacagtttagaataatctctctaatttaaggtccataattttaattttgtgtaacatccatttcgccatgttatacattctattcataagtttcttagtggatataactcaaagggtgggcgggggggggcactactcagctcaccacactgatttgggaagtgatcccaggaaacacaagtgcagaaataaattgagaaatgaaagaaagccaattacatgagaaatgagataaagagttcattcatgagtcagttatcatgtggaaaacttggcttaatcccttttacgactctctaagaaaccatatgaaatgtgtgatatagctcagaatcttcctaaggactacagggcctgcgactttatctccacttcccatcctcctttgcttgaattgtttgaagattggcctgggagtgttaattctaatgtactttaagattgggctatgtaactgcagaaaagcaactatcatgggtgtgataaagctcacaggcaaaggagaagggagatactcactggaggtgggaaggttgtcatctttgcagaaaactgtgcctcagctattggcaaactgtgataggccaagagaataagggatggggcatcaacagcatcagttataagggctcacctctgagaatatagtgaatgcctttcaaggtctctctgccctccctgcaccacatttatttagcattagtgacctcttgtcttccaatacatgcccatatcacatggccctgcagcctcaccacatggactgggtctaggatggacactgacccaggctaggccagaggactaagtgacatgtggctagttactcctgtaacagatgtgcatgggagctgtgggaagaaatgttccattcatgctgtggactaaaggatggtggactgcagagaagaccaaagcagatgagcagagagaaggctccaaatggagagcttaggcaattttatcatgtttgtttcttttagaagcccaatatcatttcttctctttgaaaaaatttgttgtgttgagacaaggtaaatgtactagttaatattgcggcagttgtaaaatttggaagcttacataagcattataatatgctcattgattctgtgagtcaggaaactaaaatttgaacaggacaaagtagaaatggattttctgtgtgccaagatgcctgtggatcccctcggagtactccatagctggagatgacacacccatattactttcaaagattggagtttattgcacagcaacagtgaatcattgctcactccgggtcccggttcttccaggattggcaggtacaccatgtccataaagaatctttctgaagtgacccttcctgtctctttttccatcccaggacacagtatgattgggttagatcattactatctaacctggcacaccccagtagaacctggtttcttgctaagctaccccatggccaaatgatcctcttccttctcagaacacacatgtttccctcctgctcagatgaactttggcagaggttgaggcctggcttagctggatgcttcttgcacaagctgcttcaaagccctgggtcttatttcttcaaataaaaatataaagtcaggtctcatcctgggtggccatgctcttagacacttgcatccttctcttctgtcctttcccaacagctgcccagtcctggttggaatattctaatactgacataattaccctcattagccactcaacccaggatccaattttaattataatccagaaatatcaggtgatgagtgaggcttctgtatgagaatgggacagttcaagtgtcaattcaatagtaaaaacacttcttaggcctttctttatcttattctcatcaaagagctttctctgcagaagggacctactggttcatccttcctggtccttgatcttctgatctagagtggcttaatagtgctgccacctctctctcgaactctggtgccgaatgattccaggaactgggccatcctgtggtgggaatgaccttaccctgagcatgtcactcatgcattgaacaacagctgagagcagagcttagagttgggccttgtaaggagagaagaatcacatcctgcagaagtctgtcctgaggaacaggtactccagtcacagcaaagacacagttgatacctggataacaataatagaagacaggacatgggaacagcaaaagatatgggtgttagaagaggccgagagcacttcaggcaggagcattcagagttgttcttggaggaagtaggcacgaaggctgggcaggatttcaaggggcaaagatggagcaagcaattcaagtgaaaggcatggcatgggaaagggagcgctggccacagggagtgcaacgttgtgatgcaaggccactgtggagccattgctagtgtattaactgcaaagttttgaattgaatcagaagggaattggaggcctctagactaagcatttatttgtgtatattttattatttatttatttattttgaggcagggtctcactttgtcacccaggctggagtgcagtggcatgatctcagctcaccctaacctccacctcccaggttcaagccattctcctgcctcagcctcctgagtagctgggattacaggcatgtgccaccacacccagctaattttttttttttttttttttttggtagagacggggtttcatcatgttggccatgctggtcttgaactcctgacttcaagtgatctgcctgcctcctcctcccaaagtgttgggattacaggtgtgagccactgcaccagttccagactaagtatttagacatttgaggggattattgacaactgggccttgggaagattattctggaagatatctatacaatgacaagattggattctgtgggggagggattatgttcatggggaggaggttatgtgtgctggtgtgtgtgtgtggtccttggacttaaccccaccacctactggcagaaggtcaaggtcaactgaaagtctttgctcacttccatcttctgcctccaccagaataccacctccccgtgggaaagggtttttaatcctcactcagtattctcagcacgtcttatccaatagctttggagtgaacaacaagaccttcataacagccactgcaactgctgtcacctttcctttgctacccctcccactccagccatgcctgcttcccccaaggcctcccgcgcaccaggcccaaccttcaaagccagcaacatgaacaagagtcctctggctttggaaagacggcggcttatgttttcctcctcatgtttcctccccagcaaaatcactctacatagagagccctctcctcgtctacaccagcaaagccactgacaccttggggatctcaaggctttgtaaaagaacggaaggaaagaaagaaagagagagagagagaaggaaagaaagaaagaaagaaagaaagaaagaaagaaagaaagaaagaaagaaagaaagaaagaaagagaaagaaagaaaggaaggagaagagaaggaagagaaagagagaaaggaagagagaggaaggaaggaaggaagaaaaaagaaagaaagcgagaaagaaagaaagaataaagtgagagagagacatatgaaagaaagaaagaaagaaaaagagaatgagaaaggaaagaaggaagcaaggaaggaaggaagaaaggaaggaagaaaggaaaataaaggaaaaaagtcttgcttccaaagacagaaaaaggaaatagaaatacctaataatcccaaaaggttatttgctgcttgagatttttggggggtttttgtgtgtgtattctacctagtaacagctgagaaataaggctcgagacaccattggttggttcagcctcactcggccaatcctgggctctaaactgctcagtggaaatcttgggactttttggacacccagagaacaggtcccagataccgagtccgcaactccaaacatcgcgattaataggaggtgaacacagcttttctcttctctttgggatgctttgttgtctggtggtgactgtgcccatgggtgagttgtatcggaaaatcgtcatgtgaggatcagaggggaaaagaaaacagaggttagttctagaaggtaggaaagggagaggaggcgctacagctccggggtgggggcggtagctgggggcggtaggtgcggggagcgggatctgctctggagaggagagggggacctgggagacaggaagcctactggtggggaggcgcagcctcgcctggctttacctcgagtgtcccgacctgggtctcggggagggggaagtggagggacgagggtgtgaaagaatccagggacaactgaagaaaccggactgtggcccgagaagtgggaagaggaaggaggaaaacggcccccttgatctctgcattgatggcttacttatggaatgtttacggaatccctctttcggagatacctgagccttgagatgcaagcgactcccagaagttggggcaccgatgagacctacttgagtgacaggagaggttgggcccgaccagcactgaggtgccaagactcctaggctgattctcctcctctgtaaccctaggcctctggtctctgcctgccctgggtgctcatggaaccagctgctgctctgcacttctccctgccagcctccctcctcctcctcctgctcctcctccttctcagcctgtgtgcactggtctcaggtagggatgtgtgtcacttgctgctgtcacctctcagaaaggaacatcaaccctgtagtctgcaaagggaaagaaggaagaactgtggggttgttgacttatcctttcattctgaacatgttcactgaatttataccagcactgtccaaaagaaacacagtgaagcacaaaggtcaagtgcatatacaagtgcaaatcttcaaaaagatttttttaactttttatttatttgtttatttatttaagagagagtatattgctctgttgccaggccggaatgaagcagatggagaatgagatcataactcactgtaacctgaaactcctgggctcaagggatcctcccatctcagcctcccaagtagctgagagtacaagcaagggccaccacactcgactaagttttattttttgtagagacagggtctcactattttgcccaggctggtctcaaactcctagctgttaaggatcctcccactttggcctcccaaatatctgcaattacaggcgcaagaccctgtgcctattctactttttattttaaaaggtaaaaacatacttgaaataaattttaataatgtattttgtttcatataaataatcacatatcaatatttaaatgcttagttaatagaactattaccaatgagatatttgacattttgaaattttaaatctttataatctgtgtgtgttttacacttagagttcatttttattggaactgttaaatagctagtggatagataccctaatggacagttcaagtttacactacactcaggcacagtgctagattgcaaaatggaggaaaatctcaggggcacagggtgcccagggcgggctccccaatgtttccttcgtgaagcaggagcagcctcaatagttactgctcccaggggttggtgctgccgaccagccacagctactggtccccagaagggttctcagcccaagaacccctgtagccttggaatatctgcttcctttcatccctggagttttttttgtttgtttgtttttgttttttgttttttgttttgccttagagttgtgataactggcatccttgtctgattctgcccttgttgaacagcccagtttactgtcgtggggccagctaatcccatcctggccatggtgggagaaaacactacattacgctgccatctgtcacccgagaaaaatgctgaggacatggaggtgcggtggttccggtctcagttctcccccgcagtgtttgtgtataagggtgggagagagagaacagaggagcagatggaggagtaccggggaagaatcacctttgtgagcaaagacatcaacaggggcagcgtggccctggtcatacataacgtcacagcccaggagaatgggatctaccgctgttacttccaagaaggcaggtcctacgatgaggccatcctacgcctcgtggtggcaggtgcatcacttcattttgctttattacttttgcacagtgtgacttttggggaaagtttctcccttaacctcaggcccattgcagaccaacggatttctatctggcgtcccctttccacagagaaagtggcttcctcttgcacaaaggccacatgagtgggtttgccctgctaagctataggtttcacttctttttttttttttttcaagacagagtcttgctatgttgcccaggctggagtgcagtggtgcgatcttggctcactgcaacctctgcctcctgggttcaagctattctcctgcctcagcctcctgagtagctgagattacaggcatacaccaccatgcccggctaatttttgcatttttttagtagagacggggtttcaccatgttggcaggctggtctcaaactcctgaccttgtgatccacctgcctcagtctcccaaagtgctaggattacaggcgtgcgccaccacgcccagcctgggcttcacttcttcagaagcacacgcattcctcagctgaggccatgagcaggggaaaatagttaatcccggaaaagaaagtcttatgcctgccttggcactgaactgtgcacgtctgagagtgaaaggagacactgtcaaaaattgtcccggggcaatcagaatcaataagaactgcccagagaactatgacatgaaatcttatttttcgataaatattaatcttgacattttcttctttcctgaaatactgattgcagagagagtgacttttatataaatagatgatttttattaaagcacaactaaatacagaaacaaagttatctataattcctgctaactccacagagaaagactaagaatttagctgggaagaaattggcaaggcttcagcatagaaatgcacttaaactgggatttctaatagtttgttaaaagtgacactaagtgattacctcagtgttgcagttagtgtattttgctttaaaaggtatatttcaggactgaaaaaagcctttaagttgcagaataattcgtggtgacatttcagtccatcagaccagtggaggcaaggactaggaaattgggttcttcccagggggccccaaatcataacaggtaggagaccctatctttgctactcacaaaggcaaccttacatctgattaaaacagaatatcgtggatggagggcttcttgacccattgtcatgactgtgttcacagcagcactgcaatgttgcccagtaatgaatggttgtatgtggcagggacccactactctttctctgtaaaaccaaccctgtcctggccttccctagtctgaattgggttgctgtaggactttttgtttgcttgcttattgtactctgtttgttggattggttggtggctgatttttcccttaaatctattgtgtcatgcttacccgtattgaacccatggaatgttttgtaggactttgttttccaatttgctgaggtattttaatttcttttctaattcaggatttctgtgtgagccttcaaatgcacaactagcttttttctcctgacaaaaattaaacagagcagaaagcactaggcttaagtgattgctttaattttctttctttaacataatttgttgggagactttacaaaggaattattcaggagaagtttggatgatcacgcatggctgaagggtctcccaggaccatgcttttgcagctctctcactctgggtattctctttcattgaaggttctagtaaagatagaatatatttaggatgagcctgaattattaggatttttggtgatgatctctgacattgaggaggcaatatggttatcttaaggatcccaggggcatccagatatttctaatacattgatgttcttaaaggactgtaagaaaattctctattggatggaacctctgggaggtaaacaactgtgaattagaataagaattggctttgccagctagttctgtctattctcctaaaaaccatcacctcctatggaggtagatagccatggtgatgtgaggccctgaactagacagaagtgtcagtgactttggttcaaaaagtttcttaagatttagccaaggctgagcatagtggcccatgcctgtaatcccagcactttgggaggtcaagacaggtgaattgccttagctcaggagtttgagaccagcctgggcaacatggcaaaaccccatctctacaaaaaaaaaaaaaaaagaaagaaaggaaaaaaagcttctgccaacctgataggtttctgtcattagtgtattattttagagcttcaggaaattgaggtctgcagagaagtcatcccaggagcagaaagtgaaattctcaacctgcctgttgagaatttggacacaccctcctggaagtgagaaaattagtctttgccagaataaattgcacagcaagcatttatagcagacagatagatgcttggtgctgtgatggggccttcaggtggagcataaagaaaagtgtgcaatgtgatcctttctctttgagatctcacaatttattttgcatattggtttcctgatgttctccaaaaccaagggtctttctagcaaccatccatcaaggtgcagtaggggctaagataccactgccttttggctgagccctggtctccctttccaggccttgggtctaagcccctcattgaaatcaaggcccaagaggatgggagcatctggctggagtgcatatctggagggtggtacccagagcccctcacagtgtggagggacccctacggtgaggttgtgcccgccctgaaggaggtttccatcgctgatgctgacggcctcttcatggtcaccacagctgtgatcatcagagacaagtatgtgaggaatgtgtcctgctctgtcaacaacaccctgctcggccaggagaaggaaactgtcatttttattccaggttagttctctgccctctgagacctatcaagtgtatgcaggatcctcagcacccagatggagcccagagcgggaatgggggcagcagtgtgggtggaatggtcctgggccctgaggagctggaggctgcagctgagttgagacgtctcccctcctcacaaagggagattcaaagagtcccaaaacacaagagtaggagcctcttctctgagggtaaacctggtcttttttttcttgattaggtctttatgctgcaacagttgtaaaatattaaggacaaccatcaaacctggagagtagtgtgggtgggtgactgtctatgcttggcattcctgtatgttgcagccatcccttcctgtctatgggacttcccaaaggacagagctggggaaattccctatcaagagacattcataaatgtattcaacaaatgttcaacaagcatttcttatgtttaagactgtacaggaaaccaagggtcaataattgaacaaaatatatcaaaatttctctcctcaaggagttcatattctagagagagacagcggccgggcacggtggctcacacctgcaatcccagcactttgggaggccaaggtggttggatcatgagttcgggagttcaggaccagcctggccaagatggtgaaacaccatctctaccaaaactacaaaaattagccgagtgcggtagcaggcgcctgtaatccccgctgcttgggaggctgaggcaggagaattgcttgaacccaggcggcagagcttgcgtcaagatcgtgccactgcactccagcctgggcaacagagtgagactctgtcttaaaaaagaaaaagaaaaaaagggagcgcgagagagagacagcaatatatgaaataattgaaacaagtgattaaataaataataatctatatattctatcacatggtgacgagcatgtaggaaaaattaagcaaagagaaaatagagagttccaggggtgtgaggcatcagaattattaacaaggtggtcagggaagacttcactgtaaagatggaaattgagcaatcaagacaaggaaccatcagatgcttaaggactgagcagccaaggtacaggaagagcatatgcaaaaggcctgaggaaggagcttgtctggcagtttccaggactcccaggaggtgatgctggtgtggctgaaatggagtgagttcaggaagtagggggagatgaattcacagagtgatgcaactacgttatatatggcagcacaggccacaaacaggctttggcttttagagtgagtgagtgggaagcattggaaggttttgagcaaataattaacatgatctcacttgggctgctctgctgagagtagattacagaatagagcagaacaagaaggagggcactctagtattccaggcgtgagtgatggtggtttgaggcagggtgatggctgtgctgactcagcatggctggttagttttatgcactctggtcctttccatggtgactccagatgtttctgctttgcccccttctgggcccggccctggcagtcactgaggtgtcagccagtgttgagccagcatcgctttctccatctaaggtttctgagggagaagccaacagaacaggtggctgaggagctcttcagatgtgctcttaggggcactctcatccagatgttctatttcaaactaaatggacttttctggctgccttttcagaatcctttatgcccagcgcatctccctggatggtggccctagctgtcatcctgaccgcatctccctggatggtgtccatgactgtcatcctggctgttttcatcatcttcatggctgtcagcatctgttgcatcaagaaacttcaaagggaaaaaaagattctgtcaggggaaaagaaagttgaacaagaggaaaaagaaattgcacgtaaggaatttgtaaagaaagtgtggaaaaatagaaagaaattcaaaaagaaaagttaaatgagtaggaggacaattgactgtcatagaaaggccacagctctcacaggtaccggcttagggaagagagagaggaaatgcacagcagcagccacaagggcttggaactctcatgtcataagaagtaatcattcagagctttctttcttccatgctgcacacattacattcattcacctggctatatgcagcactacatggctgaacgaaagttcagacaaaagtctaacaatgtactgatactacccagccatctgatcatacatcattgctggtttctgactgttccttaggcataaacgaagggtgatgttggtgttcatagaaaggatggttcctacgttgtttaatacaagctcaatttctcttagttcttctgttgaagacatgattttgtttctgtattttgttttcagagcaacttcaagaagaattgcgtaagtttagcctttcctgaactactccgtgtacaatttgtgttctgcttacttagcagtgtctcgtgacattcacctctgtctgtcccttgcaggatggagaagaacattcttacatgctggtgagtgcctctgatgttctctcagatctcagctttctccccactagccagctaacaggactccttagaggagatgagcaaggggcccagggctacacagggaccatagggaactggggtcagttcatcaacggtgtcccagcaatgatgcatcatggctcttctgtcagggaaccccagcagctcttaatgaaccctgcagtttacatccccaggaccctttctcttttggaataatttaatgcatgattatcaaaggtttcccatgcatagtagcctcctaagagttacatttcagaagtcattgctctttgattctggatcaatttgaaataagataatgctgtcttagcaattcatatcctgggaatggtatagactgtgcacagttgaagacctatgtgaggaaaaggccataagggtccccagtaagcctgatgcaatggtgtacaaataggtggccagaaatacctttctgcctctaagagagcactgatattctgcatgtagtctgccaggggaaggggtttgggtgagtgggagggtgagtgggagagcacagagaaaccaatcgcccacttccagtgagttctcatcttgtgattcggcacctctgcctgtcagcaccaaagaatccaaactttaccagataccagggcccatggacctttcctctttggcgagtttcaaaattgccactgtcattttgggacacaatcacaacttgtcacaatcagacatatcaacttgtggaaaagagaaaatcattttaatgcaatagaaaggtagactgaataagtaagaatacatgcagaaggtagaggtttgcagaatgctcagctcctggggcttttcctgtatgggagaagtaatcctggtagatgtcagactcatattgttaaagcaaaactggattgaagtatttcttccctaactttgcccacacatccctcaggcaccaggttttcttttgcacacatttattctccttctttatcctttgaagtgtgcccttgtcagccacttaaatcagttgtcacctattaaaacaacctataggaccaacgaagaggtccttcaccacctaggacagtgtgtaatgatagactcacttaattgatccattgagaggtatgtgggggaacaataggagataaagcttctgtgatggtttaagccaagttggaaagtttctaactaaagaaagtcccagagatcatatatcttgaatagaaaagggatcagatcttagaatgctgagaaaaactgggaaccattaattttggctcatttcctaaactctctggatttcatagagccacaattcttctcaacctgggggcactgcttctgtctctggagagatagaagtgcagcttccgtaattctcagggtatgagctgcctgggatcaggggaccttcatggaaacggccactacatggggaacccccttcagctttctgagacttctctggggaccaggaaccacacaatccccagggttcctgagaccccaggcataaacctgagacttcctctgcagctgatgtggtcctggatccagacaccgctcatcccgagctcttcctgtcagaggaccggagaagtgtgaggcggggcccctacaggcagagagtgcctgacaacccagagagattcgacagtcagccttgtgtcctgggatgggagagcttcgcctcagggaaacattactgggaggtggaggtggaaaacgtgatggtgtggactgtgggggtctgcagacacagtgttgagaggaaaggggaggtcctgctgattcctcagaatggcttctggaccctggagatgtttggaaaccaataccgggccctgtcctcccctgagaggattctccctttgaaggagtccctttgccgggtgggcgtcttcctggactatgaagctggagatgtctccttctacaacatgagggacagatcgcacatctacacatgtccccgttcagcctttactgtgcctgtgaggcccttcttcaggttagggtctgatgacagccccatcttcatctgccctgcactcacaggagccagtggggtcatggtgcctgaagagggcctgaaacttcacagagtggggacccaccagagcctatagaatcaattccttggactcacagccatgcagataagccctggccatctcagcagccaccgcacaacccccctaatgaaagacacgccctcctcccctctggtcacgtaagagaacatcttccagctgcctttttcacacccactccagccctctgccccagttttctcctcctcactagtctgtggctttagtagttcctttgcttgtaattatgggatgggatccaggcatagggaactagttgtttcatagctcccagtcaaaaagaaagtgagagaagctgttgggcagcgaacctactgtttaaaatcaggataaccacattaagcccaatatgccagttggcaccagatgctgtggacttggaatgaggccaacagggttcaccaggatgagagaggagagaggaatccacaggaccaccagaagggagagggaaccagatatgcagatcagagatagaggaagtggaaccagagagctgggagggaccaaggttgtaaggatggctaagtcccaccataagagctaaagggtcctgggagatgatggctcatttccacccaaccccaggatttccacagcacacacccacaggcctggacctgggatgaagatgaatgaagaacatggactcatgtggatgtggtttggctcagatgtccctgcaataaacaaggggtcagtacttagtccctgagtgtggttgaggtttgaggtcctggtcgagcagggcagtactggaccaggtctacgtcagcattcaggttcaatggggacaccagtggcttcaaacttcctgatctaattatgtttttagacacttagaagttattgaggactttaaagagcttttgtttatttgggttaatatttatgacatttgacattgaaacaaaaatttaaaatgttatcttttaatttatgttaaaatagcattaataaatcagttataggttaatgtagataggatgttttgtgaaaaagcaatctattgtgtccaaataaaaaaacaaaaagtgtgacactggttaactttttccagatctcatgtctggcttaataagagatatttgtattatcatatctgcctttgtattaaacctattggtatatcataggtcatgttagctcaaaaaaactttactgcacactactgagagaatgagatgaaaaacgattaatgtttcattattattattgtgaaaatattattaacactggggactccttaagagtacatcagagttctctctaggaatcccaaaaccacattttgaaactagaatagtggatcctggaagttaatccatgtgctggttaattttagatgtcaacctgactggattaaggaatacctagacagctggtacaacattatttctgggtgtgtctgtgagtgtgtttccagaagagattggcaagtgagtcagtgggaaattctctccttctgttggctgggtgcccaatacaacaaaaaggcagaggaaaggcaaattcttctctcctctggagctgagacactcttcttcttctgcccttggacatcagaactcctggctctccggcctttgaacttcaggacttgtaccaggaggccctgggttctcaggcctttggctttggactgagagttacacaatcagcttccctggttctgaggctttcagacttaaactgagccatgctaccagcatcccagggtctccagcctacagatgagctgttgtgcgatttcttagcctccataatcacatgagccaatctccttaataaatgcctgctcatagatctgtatctacatctatatctgtatgtgcatctatatctatgcctatatctatatctatatcatattgattttgtctctctggagaaccctgactaataaaatgaggcatctaaaattctagcttgaatggtagtattttaggttttagacaattcagtaatccagttggactgaaaaaatttaagtaatcaaaaattttattactgcagttacaaatagacacaatattgaaagaatcaggagtgattttttcaatacctgatttgtaaagatggaaagcaaggttgtttgtgttaatgtgtatgtcttagtctatgtgggcagctataacaaaaatatcaccaagactgaatggtttgtaaacaacagaaatttatttcttgcaattctgcaggctgggaaatctaagatcaacaccccagcataatggtgtgtggtgagggcccatagacttgttcacatgccaaaggataaagatagatctgtagggtctcttttggaaggacactaatgacattcattagggctccctcaacctcagagagaaaatagaaggaggagattccaaacttcctgctgctgccctgacctgctcctgcccctcctcatctattttctctgatttaagaagcaggtatcctttcccctgtgtcaggctaattctccatccacaccctggactctcactctccagtttcccttaggacttctgtgttcagttcattcattcattcaacaaaaatcaatgagtactaactacatgccaatcagtgttcttggtactgggggcagagaagtgcacaaagtgtaaagtcccattccttatcattgtagaagacagaaaacaaaataagtagtaacagatatggtgtgttggatgatgataactgctcaggagataaataaatcaggggaaggaatataggaaatcacaatttctaaaagagtggtaatgagcaatgggagtgaggcacagaatacctgggagaaaagcattctaagttgagagaacagcagtgccagagcacagaggcagaagcactgtggtttgtgtgaagaacagcaatgaggctggggtgggcagagcacacagggtgatcaggagattaggaggtgacaaggccagagggggttgagggccagatcatatatggccttgaaagtcatcatgctgacctgggctttacctctcagaggggagccacaggaaggttaaagcagaaaaaggactggacttacttacattttaagaagttacttcacatgctagactgagatgggctgtgggtaggggtggtggatggaggcctgaagacccagctgggagctactgcagtgatccaggggaaagatgcagatgacttgtaccagggaggagccatgaaaatgttatgatgctggatttattttcaagacagagtaaaaaggctttgctgataaacttacaggtggggtatgaaaaaggagggcatcaagggtgaccacaaggttttggtcctaagaaatggtacaaatggagttgccacttactgagatgaggaaactgagggagaagcaggttttggaggccaggggaggagccagcatagaatccaaggtcagttttggatacgttcaggttgaggagcttactagagatccccgtggagatgcagagtaggcaggtcagtaataaatgtgtagtccaggcaacgggtcagggctggaaacacaagtttttctctttatcttctttatctgcatgtttgttgtcatgcctgtttcactttaatgcattagtgatctattgctgcataacaaattaccacaaacttagtggtttaaaacagcacacatttatcatttcagtttctgtgggtcagaagtccaggcagaacttagtgagctcctctgctcagaacttcacagagcaaaagtcaaggtgttggccaggctgtagcctcatctagagtctcgactgtgggagagtcctcttttcagatcactcaggttgttaacagagttcatttctttacagttgtaggactgagggccccaactccttgcaggctgaagctggaggttgctctcagctcctacaggcctcctcagctccctgctgtgtggatccccatgatgactactttcctcttcatagccaactaggaagacagagcctctagagtgggtcagctagcaagagagagtcttacactacatagtgtagtcatggaagggacatcccatcagttttaccatattttattggttagcagcaagccacaggttcagctcacactcagggaaagtacaggctgcaaactgcaagaggagtaatcataaggggtccactccagactctatcggctacatcatataagaagctcaatgttctcccattgtaactgccctgcttcctctttccctgggcaatacaaacatgctaacctctctctaggtctctactttcatacaagcaaagtctcagaaagagaacacatacatggccatcagggactgtctgccatcatgatggccactgctgtaccacaccataaacattgtttgtttttttctttctttctttctttcttttttttttgagatagactcttgctctgttgtccaggctggagtgcagcagcatgatgtcggctcactgcaacttctgcctcctagattcaagcaattcccctgactcagcctcccaagtagctgggattacaggcctgtgccaccatgcccagctaatttttgtacttttagtaaagcggggtttcaccacgttggcctgactggtctctaactcctgaccttaggtgaactgcccgcctcagcctcctaaagtgctacattacaggcaagagccactactctcagcccataagcattgtttctatcagttactaatggtttcccaaccattaaatccgttacacatttctattttcccctcccacccccgtgctttcctttttagagagacaggatcttgctctgtcacacaggctagagttcagtggtgtgatcatcgctgactgctgccttgatctcctgggctcaagcgatcctcctgccttagcctcccacagtgctgggattatagctgtgagacactgggcctcgcttgtcattatacacttctgtccttcctttatggacaacactgagttcttcatagacctgcctgagtaggtgttcctgcctatgtggcgtctgcctcatcaatccccagggccctcttcttggcctttccctgctcctagggagatctttctcagaattcttgcttcacttgctccagaactgctgatattccttaggctttcgtcttggcctctcttttcacaccacatatgctcttgtggggtccaatccgttttcaaagctctatcccataagcagactcccaccagcacttgcatttctgtctccagccccacgcattccctgaatgcccactagacatctcacaatgagtgtgtccaaaactaaattcccatcaaccctgcctacccatcattaactgaatgagtgacaccacctaagagtcatttcagccttctcatgctctcttttacctaccacttctgactgatagccaggccctgctatttatacttcctttcaatagtctagctcagtggtttcatcacagactctggagtgagacagcctggactcaaagcccagcttagaaagaaactactcatgtggccttggggagttatttaacctctctggacctcagattttatatctattaaatgtgcgaaataaggtttctacctcttagggttgtcatgagtcgtattaatacatgtaaatctcttagcacaataccagcatggtagcaggttctatgtaagtatttcctagtattaaagttagtaatcaataaagtctcctatcccccattgccaagccaccataatttcttgcctagactgtcacagtagcttccttcctggtctccctatctcctaacatctggcccaccggatgaggatgggatatattgtgcaaccccagcagacatcatcccatagaatacaatgtaaatggcacctccttcctcccatcttccctgcacctacctcacttctattttaaacatacacatttcctcatgtcaaacttttcagatattttcccttcaccttcccactaaaactccaactccacagcagacatctgttgatgttgtctccaggggaagtggatttaggactcatcaatgcagggatcagaattgagcctttcagaatggaagacaatgaaattcattgagggttactacttgcagggcctgtgctaactgctccttaaataacttatggaacagatctcatttctgccctacagatgaataaacagagaccttgagtaattagttaaccggctttgggttccagggctaatgagttgtgaatgagaacagatgaacatagaaaaaaaaaatctcgagacagtagatagtaaggcagtgtgccttggatgtgctgacagatatctagatacagcataaagaaaatgtgtgttcatgagagttcttaatggcaacaagaggtagcatgatatccatgagaaatggacatttgttgatgagactaactaaacaaaggagacggatttctgggcatttttcaacacctattgcatgcaggacactgcactaggtcttgtaaaagacaaagagaagatagcatcaagggcctaggtcttgaaggagggctgagtacactttcactaagtgtacattcttgtgacatttttttttgatacactgttgtaagcaaactgcatgcattatctcattccatcctcacaacagcaacccaagaagtcaagtactatcactgtccttattttacagatagggaaactgggcacagagatgttaggtaactggctcaaggtcacgcaggccacctagcttgagaattagtgctcttatccactccattatgcaacttctactcactaattttgaacttcagtgcctgagaactactagatgataggttctcaataaaaatttgttgaatcactgaattcatttctgccccatttcacatccatttctttcccaagatttctttcccagagttctgtgtgaaggactgcatgagaaatggagcaaggggcctgatactttggaaactacaaacttgagagatatgaattattgggcccagaaactcctaatctgaagcttagcacctcagctgcttctttgtgtcaaagtgatttggatccttcaggcaagggtgggtgatcactcttactgatataatttcaagcaacacagcttctgatagactatgaatttaaaaataagcaaatgaggtgcagtagctcacgcctgaaatcccagcactttgggaggccgacgtgggcagatcacctgaggtcaggagtttgagactagcctgggcaacatggcaaaaccccatctactaaaaatacaaaaattagctgggtgtggtggcaggtgcctgtgatcccggctactcgggaggctgaggtaggagaattgcttgaaactgtgaggtggaggttgcagtgagccgacagcatgccactgcactctagtctgggagacacagcgagactccatctcaaaaaaaaaaaaaagagaaagaaaagaagcaaatgaacaaataaataaggatgatggatggatagggaatgaatagtgatatggattataataaagtaagaaagtttagtaaaatattaactctatcaatacaatttacatggtaggtaattggtattcactgaaaattctttcacctttgctttatgttttagaagttttatgacaaactgctggggaggaaaaagggagagggaaaaattttgtacttctgctgataacagagaccagaaataccactggcttaaacaaaacaagggttttcttgttttttttgttttgttttgttttgttttcatgtaaaatcaattcaggtggttgcagtccagggctgatctggcacctcagaggtgtcattcatgccccagactgcttctgacttcattctctgctgtctctgcatgtggcttccaatgtcaaggttgcctcatggtcccaggagggccgctgcacctccaggtcaaaagcctacatcgcaggcaagaggaagaggaagtacagagagtgtaccctcacactcccagctcttttggcccctcctttgaaggatctcttggagaagcataagcccacagctgtcacctacaaaacactggttccaactttgtcccttggtctctgctatctaccagatggaaaagaacgttgtagtacctaagaaaattaggccttatcaccaagaagaaagggggaatgcatgatgcagaagggaccagccatctcaatcagatactacacagtctaaattcaaacatttacaatataattaaattgcatcagccccagtcacatcttagccttaggaacttcgatcattgacttgcaatcccagaaagtctgttttgaggtcctaggccacaggaagaaccaatttgttttatagacatcttacagagacagcattcacagtttatctagagtctggcctcagagaatatgtactccactggcagcaggagaaacaaatacacaggaaaatacagtgtagcacagaacaggagctgagggtgaatggagatgctcagaaacacctgcactaaaaatttgctgaaaaaggtaaaacgtgtcaagcagcactgcctctggaagccagaaaaattacattttttgataacagatcctaagcctggatgctggaggtgcttaaaaatgtgcattgtgggccgggtgcagtggcttaagcctgtaatcctagcactttgggatctgaggagggaggatcacttgagctcaggagtttgagaccagcctggccaatatggcaaaaccctgtctctactaaaaatacaaaaagtagccgggcatggggcgagcacctgtaatcccagttattcaggagctgaggcaggaaaatcacttgaacctgggaggcgaaggttgcagtgagccaagatcctgcaactgcactccaacctgggtgacagagtgaaactccgtttcaaaaaaaaagtgcattgtgtctggttttctttccattcatacgtttatttgactctgtagtaaaatctcctcctcctccatgtacccatattcatgcaagcaaatgttagcaaactgccacagtagcattttaattagtgctcatctttctctcttcaccacattaaaatcttttcccattgtgttctgctgatatttctattatgataaaagacttaagacaagtgactatatagaaatacgtatatacacacaagaatgaaagagataaacagtaagggaggtagggcaggaatttttcttcaacgtgtacaattcaatgtactttcagttttcatttcagccttcctcagtggtttctgcccagcaactgatgagaaacatcacctctgagccaatcaaaaaacttattcttccaaagagagattgttattattcctcacgatgacccgacagtctctgctttctttttcctttcttccagaaggagatttaaccatagtagaaagaatggagaactattaactgcctttcttctgtgggctgtgattttcagaggggaatgctaagaggtgagtgggggaagtcgattagagcctggttcacaatgcctgggaggacaggggctgaatcgctgagagtggtgagtgggcatgcagggagagtactcacccagagaaaggggtgtgtgcctgagggggtgcgcacgcacacatgtggacacatggaaaggggagaagtagtgcaaagaataaagacctgcagagtttgggatttggtgaagaaatagtctaattgcatgttcttaagaacgtattgtagtcagaaaagggcaaacaatctttaaaatctgttctggacaactcaaggcatctattctaagagattctaaaaagaggtgtcctttatagattcatatgtaaatttgttcattacagaagtattaaaaatgtagaaaaacctgaaccagcatacatatacaacaggcgggggatagacaaacaatgcatggttcaatcataaaagagatttccatgcagcctttaggaatcgtgtttttaatgaagggcaattatttataattttagcaatgttagatccatacattaaaccttgttttaaaatcttttaggaacagtatgtgtttttccttttattcatcatttcccccaaacctaacgaatgctatccaatggatacaatctatttcattgtatgaatgtacaatttttttgtttgttttgagatgcagtcttgctctatcacccaggctggagtgcagtggcatgttctcggcttactgcagcctctgcttcctgggttccagtgattctcctgcctcagtctcctgggtagctgagattacaggtgcacgccaccacacccagctagtttttgtatttttagtagattcggagtttcgccatattgtctaggctggtctcaaactcctgacctcaggtgatctgcccacctcagcctcccaaagagctgggattacaggcgtgagccaccacacccagcctttaaaattatttttaaacacttccctagtttggactatttctcttttctgcatttggctattgtagattttactgtattgagcagcctaaaacataaatttttgtcttagttcctgattttcttttttctgcaacactaattcctacaagtggaacatttgggtcaaagcacacaccttttttttttcttttaatagccattccttagcaaagcatataactttttttaaggccctttatatatatatggtcaaaatacttccagaaatatttaccttttcactaccaaagtatatgactactactatagatattttattttatttattgattgatttgtagagatggggtttcattatgttgaccaggctggtcttgaattcctgggctccagggatcctcccatctcaacttcccaaattgcaaggattacaggcatgaaccactacttaaacttgtattcctttatgctttttttcatttgcaatattgactataatcaggaaaaaaaatatatcctttatgaagaagaaaaacttatgtctcattctaaggacagcagagaaattgttaactcagggaaaatgataataaaaatgataccccctctatagcaacataaagagcagtttcgaggagcaaaagatgtggtgaaatgcattgtttactctgggtgggtgcaagatccaggcaggggtgaagcatggccggctgcacagatctctgttctcttgtttcctttacatccctccccacctccctctgcagatcttgttctcagaggccattcccagacccacagcaagagggattatggctgcaggcctcatgctcctttgttttggaagaaactgttgaggagttagtatttactgagcagctaatatgttcccgtcactattgtaactcataataattattgttaagtaatacacgaaaagttttaaatttaaagcattccaatattttaaaagtaaagggaacaaaaggccaagtgtcccttcactcactaacctctgatcttcagattagcatgcgtcttttttgagtttttcaggcatttacataaatagttatgcagaaatggatagctttgcttctgttcttcaattgaatctttagtatagttgtgcaaggtgttttttgatcacttagtgtgtctccgttatctaggttcatgacaacaaatcaactctttttacctgctgcattgaattccctccgagggatgagccgtcattcctctaagcagtctcctgatgggtggctggttcagttggttaccatttttatactttaaaaatagtgctgcagtgtcattctcacagaggcttctgtctgcacccatgcaagtactttgctcgacttgacatcaggaagtggaactgctgggccaactgtgcaattctaaatttcacacttcatgatattgtataagtaaataaagttgcaatggttttgtcccatgtctgagaccaaagagcttgtgaatcttagagcctttacttattgcttaccctctttgtgtccctaacccttatatcatgggcctggccccttgtgggtgcttggtaaatatttgttgaatgactttatgaagggaagaaagaaaaggtaagtaaggcctggtcttatttgcagctctgtgatcactagccttggattaaatgtggtgggttcagcccctgactgacttcaggtcccccaccaagcagtcttccttaatcctaccaggagtccactaggccatgagttgaccatggtgatggccaagagttggggctttgaggagtccacagtgtgggacacccacagcggtcgaccccggtggaaccagggagcccagtgaagagtgtcctgcatgaatcagagggggattgtggtgggttggacttggcaggggaagtttggggaagtcataggattctgaatattgttaaacagtacagtgaggattttctgatcgaataacagatgtgcatttcacatagacatgtttttacaggtgattttcaatgttgggactcaaaggtgaagacactgaaggacagaatttttggcagaggaaagatcttcttcggtcaccatacttgagttagctctagggaagtggaggtttccatttggaattctatagcttcttccaggtcatagtgtctgccccccaccttccagtatctcctgatatgcagcatgaatgaaaatggcaagtttcctggccttccttctgctcaactttcgtgtctgcctccttttgcttcagctgctcatgcctcactcaggtagggaacaattccacgcttgtttctgaagcagacaattacctaattatgtcctcataggacttttgactccttcccaaacctgaagtccatcccgatctgaaggttcacccgtcactaagagacaaatggtgcttctgttaagatcagtttcccccaccagtttctttgtatctcgccttccctgtctgagaagcacccttcctctcatgaccccaactccaaaaccctctgacagatcctcccccttgtgcctacagctcagttttctgtgcttggaccctctgggcccatcctggccatggtgggtgaagacgctgatctgccctgtcacctgttcccgaccatgagtgcagagaccatggagctgaagtgggtgagttccagcctaaggcaggtggtgaacgtgtatgcagatggaaaggaagtggaagacaggcagagtgcaccgtatcgagggagaacttcgattctgcgggatggcatcactgcagggaaggctgctctccgaatacacaacgtcacagcctctgacagtggaaagtacttgtgttatttccaagatggtgacttctatgaaaaagccctggtggagctgaaggttgcaggtgagcctccaggttttgttctgagaacatttctctgtaggatctagagcagatgcagagtccctcttgcaaaagcactgcagacactcctggctgctcactagcaattgcctgcactgcctcccaacttagcttctctgaggcccttgagtaagacacaggttttcctttaggaagaattcctgctgtaccctacatgctcaagtaaagaactcctttcctctggccaccagagatataagggaagtgaaggacaagggatagaaagcataagaaatcatctcttcagtgactagtacacagtcattcgtgtttagttctgtactggatggcttctgtggctccactaggtacatgctattgtgggccctagaagactgggctatctggactgtatctgctgccaatgttcttgagccaatgaccctagaatacacctgtagtcatgggagctgtgtttcttacttgttgcagtgaggaagaacacatatcatggggagctgtggtggagtctcagtaagaagctgttagagcagacttagtatataatttgggcttgtgttaggggatttgggaggagggtttatagactttggcctctgctctggatgagacactgctaggaaggtgtgggcaggttaattctatgagtgagaaccttaatcaatcttatctaggaagaaagagaccagggtgagactaaagctgtaattgatgaagggacagcaatccctcattgctgatgggggttgtttggtcactgctgtggtttggacaatgttcatgtttttctctgtgctcacacatgatgtggggtggtcttgtttttcccatgatccatcatagtcacaaagtgccatcatctgatgctggtgttctgtgaaattgcttttgttcaacaggaggacactgagtcctgttgctgcttccagataaagggactgctcttttctttcttagtgcaatgcttttccctgtggcttctgtttaagggtttggtcagcagggatctgtagcagacgatgaagggagggagagaaaagagagatctgggtgcttagtccctggcttccttcctgcaagttaccctcaggctggctgcattgccttgctgaaggtcattgcccctctcaagaaagtccttaatgcataaatctcttcttttgtgtcttcaaaacagctccctctcctcctccctctggtaactgtggtgggtgggaatagccccactgttactgaccctgggatactgcactcattcatgtagctttctcctcactaggaccacacttttgtaagcagctctaaaatgaaattgttcttgaattatggaatgtgagtgtgccatgattccttttgagaccctctctgatacaggcctctcaagaatttaggctaattcatccttccacagcactgggttctgatcttcacgttgatgtgaagggttacaaggatggagggatccatctggagtgcaggtccactggctggtacccccaaccccaaatacagtggagcaacaacaagggagagaacatcccgactgtggaagcacctgtggttgcagacggagtgggcctgtatgcagtagcagcatctgtgatcatgagaggcagctctggggagggtgtatcctgtaccatcagaagttccctcctcggcctggaaaagacagccagcatttccatcgcaggtcagtacctgcttggcctcaggttttctgagctgggctgtggcagttgaatgaagggggaggtgttagtgtctgcagtcaacctgggtctctgcactgaatataaggcccaaagcacagacctggaggctcctccttgcaccgggggagcttctcttctccataaagctgttcatgacgcaaacatttactgaacatttcctgtctgccagaagtataacagtaattggaattaggggataattgttaagataagctgcgtatgtaaagtcaaatgacaaaaggggaaagcatatatatatatatacaaactcatagagaaagagccaatctccttgagacagaagattttaaaaactgagtaaaaaattttaacaaaggtcataaattatttaatttacagaaaaggaaataactcacaaaagagtgttcgttctcattcattagagaaacatactgaatcatttttcacttatggtattggcaaaaatcaaaacaaacatctgttggttgataacacatggttatggcaggaatgtaggaaggctgtgactcctaggcatctgctgggatgacttgtatttttggtgtgcattagcacaacctctgttgggggctatataacaatatctatccaaactacatctttagtgatccaaaattccgcttctgggaatttatttggtagataagcttgcatttgtatgagatgatccatgtaaaaagttattttttatagcactgattatgactgcacaaggttggaaactatgcagatgttcactgctggagaactttcatgcaatggataccactcaactgtgaaagaaaaaagagataattctctctatagtgaagtggaaaaacctccaagattaactttgcacagaaagagcaaaatgcagagtggtgtgtatggaatgctatctttagtgcaaataagaggaaaaacaagaatatatttttatttacatttttttaagttaacaagtaatgtcataacactcactaggtgtcaggcactttataagtattaatttaatccttctaacttcaggagaagggcagtaggaacagagaggttaagtaattagtctaaagtcacactgcaagtcacctaaaggagccagcattgacacccagggcctccagctccaaagttcctgttcttaagcatcatattaagcagactaatttgaagttaagaaagggagggtgggagggaggactgggtggatgggagacttacgtgactttttatacatgtattttagaaccatgtacatgtgttacctattaaaaagttgaattagaaaaaaatatgtttgatatcctcaagtcactcactttccacatgagaggcagacgtctcaagagaagtaatagtagcagcctctagtgggggtttatcaaagtcttacccactgtcctctgagattttagcatgagaaagattatttaacctcatgagatagattccgtgccctgtgacctggggtgagcagctaacacttggggcgctgcagtctggggaggctgagtgcaccggcccccatgacccacagccgttgccttcacagaccccttcttcaggagcgcccagaggtggatcgccgccctggcagggaccctgcctgtcttgctgctgcttcttgggggagccggttacttcctgtggcaacagcaggaggaaaaaaagactcagttcagaaagaaaaagagagagcaagagttgagagaaatggcatggagcacaatgaagcaagaacaaagcacaagaggtagctgaccttgggagtttatctgagcccctggcttacgggccaaagcccaaagacctcacgcccatccccaccgcagagctcagttgcttttaaggttaattttttagaaaaccccctcacctgtaacagttcattattatttctgcttattttccagtgaagctcctggaggaactcagtaagttcccattcccccagagacccaggcatgtcttcctgtccctgctttatgcgccttgatgcatcttcccctgttccttccgttgcaggatggagaagtatccagtatgcatctcgtaagtgcctctgacattttctctgaatttgaatctataactgtctgtgcttgaatagtttccactcttaactctttccccaaggttgggaagtggtcttagatccctttgactaaggaaagaaaatagatgtgccaattcctagtcattgccaaaaagaaaaaaaaaaaaaggaaagagaagaaaggaaaaaagaaagagtgtggctgattggagtaacacccaggaggagtgtttctttctccctctctttctctttctcagctggtctcgaagaaaagatgccttcaatttatctctaccaggggccacagactctatagccctgcaaagcactgaggaatatccaggggcacatttgtaaaggaagggggaagaggtagatgaagtgcattctctatggcaggaacttcactagtcattttacataatctataggctccagagaagaaaaagaataaaagataataaagaacaagaaaatctgaaaagagagagggagaaaagtgtgtctaataaacaaaagtggcctgaacagtcgctcagttggtaccaatttattctaactgacttcaaacactagtccctgaaattgctcattaaatttcccaaattcttttcagagtaaggtacgaaattagattgatatagaaggatcttgcaaacacacacacacacatacacacatttaaatatatatatacacatatatacatatatacacatatatatgtgcatatatatgtatatatatatgtgtatatatatatgtgcatatagacatggagacacctatgcccaggtacaggtatatagatacattccaaatagatcagctgaacaccatcaggaaggaactctcgcaatgtctgccatgtcactagcattcgactgatgttcctggatttgatactaagaacaacacaatagaaagaattgaacctgcagaggaggaagatacaggtggtaaaaaaaaaaaaaaaaaaaaaaagattagatggatgtaaagttaagggaatggggccaaatcaaaaatggcaagttcaggtgacatctctatctttttttcattgtagggggagagagacattcagcctataatggtgagtgaacctgatgctctctgagtttgctgggacacgtgccatgaacatttcaaccttttctctgctgtgacccattgatgttctcatttgcatgaatcagatttaacccaaagactcaatttgtgtgttgtggggggttgatttctgcttttctggagaatcagagagactcctgaccctgcacacccccttgcaaagcctggccttgcagcctgtacccttcattgcagagggaacagagctcaccatttttgagaaggtaccacccctgatccatcagagctgtagaagagggaggctggaccctggaagagactctgaagaaaaggagagaaaacatgtagtgaggggagagtgcagtggggaaaagtacaagaatactgaccttttccttatctgtgtctccttcctttcagaatggaaaaaggccctcttcaagcctggtgagtaaatcactgtgtgttccctggaccaacaacctgagggactatattcctttttcctttttacttctccaactgttgtgatttggggaagaaaagctcccatgactaggagaatttggggtaggcaacattaaattccaatctgaaaagtgggcccatctccaagaccctttctgctgagagcccagggaaccagggcgaatagatctcttgcacttcctcagaccttcctgggaaggaagacatataaagggtggatctgaggggaaggagacacacactgagtaatactgcagggagagtgaggatggaaatgccaaggaaaggaggcgatgcctgcccaaagaacttagtccttcccagacttctcatgccacctactgtcagtgccttctcaaaaaaacttaatgcttctgagctttggcctccacatatttaggtgatgatttcaatctgtgtttgtgggggttgaggtgaagactgaaggaataataaatatccattggtcaaaaaccttaagaaggagatgatgagttcaaactgcgtggttgaaggtttgcagaaaggagggttaagggaaagcaacaaggaaaagtgcagtgcccccatggttcccaacagtggggagctgtctccactcctacactgggacggctagggaggggaggcagttactggaacccagaataagaagtagctcaaagagagggctccctgagaagagtcttcaggccttgttagagcagcagcagctgctgctggcagggaggaagcaggaaattaaacggtgtgtctctcctttctttctccttccaatctcctatcagggcctcccattggccaaacccaacagcaaaccagaggacaagggagcccagtggcactgtctcaggaatctgcccagaggacagattcctggggcccagaagagggtggagaaagctgaagggtggagagtgaatctagggcatataaggcaccacatagagcccagcacagagacggccttgcagctatcaggaagatgaggagcttccttcatggcctgctgtgggctgagtaaataacatgattgccttctacagcgctagagattcatttgtttatccccatttttcaggtgaggaaatgcttcagatgaggctccactttgttaaataaattggatgtatggaaaaatagactgcagaaaaggggaactcatttagctcatgagtggtcgaatgaaggttgaaaattaacctctgagtataaagcattagtgggcagagtgaatatggggagggaaacaagaaaaacgtagaaaggatccttgctgcttcctgaggccgcgtcagggtattgggttaggcagagatgctgaggcaaccctcatttcaccctcctcttcccctctggacacaagatacctgatacctggggctttctctcctgacatcgatgagagagtcacatttagggcagactagggacaccaggctttggactcagacctcctcagcatggcccaggccttgcatgctgaggctctgaaatccaggaaaaatggttgacctcatggacacttcctcaaactctctgcagcggatgtgattctggatccaaaaacagcaaaccccatcctccttgtttctgaggaccagaggagtgtgcagcgtgccaaggagccccaggatctgccagacaaccctgagagatttaattggcattattgtgttctcggctgtgagagcttcatatcagggagacattactgggaggtggaggtaggggacaggaaagagtggcatataggggtgtgcagtaagaatgtgcagagaaaaggctgggtcaaaatgacacctgagaatggattctggactatggggctgactgatgggaataagtatcggactctaactgagcccagaaccaacctgaaacttcctaagccccctaagaaagtgggggtcttcctggactatgagactggagatatctcattctacaatgctgtggatggatcgcatattcatactttcctggacgtctccttctctgaggctctatatcctgttttcagaattttgaccttggagcccacggccctgactatttgtccagcgtgaaaagaagaagagagttcctccaattctgaccgagtgctgatcattccctagagacaccagtaaccccgggcttagctaacgaaagtggggagcctcaggctgaagtaacttttctctgcttctccctgcccagctcagagctgagggcctccccctccacagcaaccaatcacaaccataaagctacaagcacgcactgaagcactttactgatactcattcaattattcatatgacagttgtttgagtttggtaccatcttattttccccttatacagataaggaaactggggtgcagaaaagtgaattgactacaaagtagacatgactagttaacaacacagctgggatctaaacagcaataactaacattaatggagaacttaaaatgctctgagtgctgtgttatgagctttggtggatgtcactcctttaatcctcgcaacaccctgtcgggtagtctcatttagcaagtatggaagttgaggcagggcaacattaagcaacttacataactcatgcagtaatttctgcagttgggagatgttcagcttcagtccccggccctatggccgttcttttccaccctgtttcttcccccataggaagaacccacctgtagccctgaggttcttttcccaggatggctccaggataaggatcactgtaggtggttgtggagttgacacccctgttgactccttcccagctgattgtcagagccttagacccagcacgccttggattagctctgcagagtgtcttggttgagagaataacctcaccgtacccacatgacacgtgatttggaaagagactagaggccacacttgataaatcatggggaacagatgtgttccacccaacaaatgtgataagtgatcatgcagccagagccagccttccttcaatcaaggtttccaggcagagcaaataccctagagattctctgtgatataggaaatttggatgaagggagctagaagaaatacagggatttttttttttttttaagatggagtcttactctgttgctaggctggagtgcagtggtgcgatctcagctccctgcaacctccacctcctgggttcaaacaattctcctgcctcagcctcccgagtactgggaatataggtgcacgccaccacacccaacaaatttttgtacttttagtacagatgagggttcactatgttggccaggatggtctcgatctcttgacctcatgatccacccacctcggtctcccaaagtgctgggattacaggcttgagccaccgggtgaccggcttacagggatatttttaatcccgttatggactctgtctccaggagaggggtctatccacccctgctcattggtggatgttaaaccaatattcctttcaactgctgcctgctagggaaaaactactcctcattatcatcattattattgctctccactgtatcccctctacctggcatgtgcttgtcaagttctagttgttcaataaatttgttaataatgctgactcttcaacttggctttttctagactctaataagtctactcggcacagtagaatagtccacacacccactgtactccccacagtttcagtttacctcattgcagtgttttcacaaaacctttattgtatgtgttttctactgctgctatgatgaattagcacaaattcttagacttaaagcaacacaagtttttggttcaaagttctataggtcagaagtccaacagggatctcaccagactaagatcaatgtgtctgcatgctggattcttttctggaggctctagagagcaatatgttttcttgtttattcagattgctggcagaattcaatttttgcaattacaagacagaggtcccagttgcttactgatttacagctgaaggctgttcccatccctagaggctgctgttttttggctcgcagctcccttcttcagtcttcaaagcagcaattatgcattgaggacttgtcaatctttgaagtttttctggttctttttccattgcacctctctgattcttctgccttctacttttgagaactcctgtgattcgattaagtccacccagataatttagaataatcactaaattttaaggtccataaccttaattctataaggtccattttgccatgttatatatcattgtcacatgtttcacagtaaacatcactaggtgtgtatggagggaagagcactattgaagctaccacttatttgggaaatcatcccaggaaacacaagtgcagaaatagtgaatcacagaagggggaaagccagttgtgtgaggaatggcacaaagaggtcattaatgagtcaccatatggacaactcggcttgtcccacccaggacactgtaagaaactatatgaaattgtggaatatatgtcagaatcttcctaagggctggggacccttgtacatttatcaacacctcccatcctcttttgcttaaatcggttgaaggttgcccctgggaatgttagttctgctgtacttcaaggttgggttgtgcatctgcagaaaaaaaagcaaatatcactggtgttagagaaagcggaggaggagagacacaaataactgaggtcagacattgttatccttgaaggaaactgtgttcctccactattggcaaattgtaataggccaagagaatatggaatggggcatcaaccgcatctgttctaagggctctgcttctgagaatataatcaatgcctttcaaggtccctctgccctccctgcaccacattcatttagcattagtgacctcttgtgttccaatacatgtctgtatagcatggccctgcagcctcaccacatggactgggtctgggatggacacctgacccaggctagggcagaggaccttcaagtgacatgtgactagctacacctgtagcaggtgtgcatgggagttgtgggaagaactcttccactcacattatggtccaaaagaggagaagaagttgaactgcagaaacagaacaccaaagaacatgtgcagagaggaaacttgaagatggaagcagtttgggcaattttctcatctttttttcccttgaggtcccagtatcattctagcatgttctgggcaatttgttctcttgagacaaggtaaatatattgactaatattgttgaagtatggaaaattagcaacttgcacaaccattgcactatgctcattgattctgtgagtcggaatctggaatatgtaaggggcaaagtaggaatggtttttctcttcaacaaaaagtctgggcctcccctggaaggactccatagctagaggtgactcaaaaaaagagacatgcccaaattgccgtcaaaaattgaaactcatttgcaaagcaaaaagggatcagtgttcagtctgggtcctggttttcccaggggtcccatgtacaccagatccacagagaaccttgctgaagtgacgcttcctctgtgcttatccctcccatgacagggaatgattgtgtcaggctgtcactatctaatgtggcacactccagtagaacctggtgtattagtctgttttcacactgctatgaatgactgccggagactgggtaatttataaaggaaagagatataattgactcacagttctgcctggctggggaggccttaggaaacttacaataatggtgacaggggaagcaaacatgtccttcttcacatgatggcaggaagggtgagtgctgagcaaaagaggaaaaagccccttataaaaccatcagattttgtgagaactcactatcacaagaagaacaaggaggtaaacactgccaagattcccagcccatgacacctcacactggttccctcccatgacatgtgggaattatgggaactatcattccagatgagatttgggtggggatacagccaaaccatatcattccgcccctggcccctcccaagtcttatgtcctcacatttcaaaacacaatcatgcctttccaacagtcccccaaaatcttaattcattctagcattaacctaaagtccaagtccaaagtctcatctgaggtaaggtaagtccctttcccttatgaacctgaaaaatcaaaagcagattagttacttcctagatacaatgtgggtgcaggcattgggtgaatacacccattccaaatgggagaaactggccaaaacaaaagggctatgggccccatacaagatcaaaatccaataggacagtcattaaactttaaattcccaaaataatctcttttgactccatgtctcacatccaggtcacactgaggtaagaggtaggctcccatggccttaggcagctccacccctatggctttgcaggatacagcccccctcccagctgctttcacaggctggcattgagtgtctgctgcttttccaggtgcaaagtacaagctgtcagtggattaccattctggaatctggaggatgatggccctcttttcatagctccactgggcagtgccccagtggggcctctgtgtgggggctctaaccccacatttctgttccaaactgccctcgcagaggttctccatgagggctctgctcctgcagcaaacttctgcctggacatccagctgtttccatacatcctctgaaatcttggcagaggttcccaaacctcaattcttgacttctgtgtacctgcagacccaacactatgtgaaagccaccaaggcttggcactcgtaccctcagaagcaacagtctgagctatacattggcctctcttagccatagctggagctgaatcagctggaactgagggcaccaaatccctaggctgcacagagcactgggggaccctggccccagcctaggaaaccattttttctcccagacctctggatctgtgatggaagggtctaccaggaaaacctctgacaggccctaggggcattttccccatagtcttggtgattaacatttgattccttgttacttatgcaaatttctgcagccagcttgcctttctcctcagaaaatggatttttcttttttatcaaatcatcaggctgcaaatttttcaaacttttatgctctgcttcctccatcactgtgaagccattgctagtgtattacttgcaaggttttggattgaagtgaaagggaattgtaggcttccaggcgaagcatttagacatttgaggggaatattgacaatagttgccacttagaaatttctttcgccagataccccaaatcgtcactctgaagttcaaagttccacagaactctagggcagggacaaatgccaccagtcttttgtgcatagcaagagtgacctttactccatttcccaacaagttcctcatctctatctgagactacctcagcctagacttcattgtccatatcactatcagcattttggttaaagccattcaacaagtctctaggaagttccaaactttctcacattttcctgtcttcttctgagccctccaaactgttccaacctctgcctgttacccagtttcaaagtcacttccacattttcgggtatcctcataacagcaccccacactactggtaccaatatactgtattagtctgttctcatgctagtatgaaggactgggtaatgtataaaggaaagaggtgtaattaactcacagtaccatggctggaaaggcctcaggaaacttacaatcatggcagaagtggaagcaaacacgtccttcttcacatgatggcaggaagaagaagtgctgagcaaaaggggggaaagtcccttataaaatcatcagatatcctgagaactcactattatgagaacagcatggaggtaactgctcccatgattgcccccatgccaaaccatatcacctggtttcttgctaagctacctgatgagcaataaaccctcttgttgcctagaacacacatatttccgaatggctcaggtcaactttggcagagggtgaaacctggcttagctggatacttctggcacaagctgcttcagaagccctggacattatatcttcagataaaaaaactgaagccagatcttagcctgagttttgtatacttacagtgtccacttctgtttattccaaagaacagtccaggcttggctggaatgatccaatacttcctatgattttatcctcattagccactcaacctagaatccaattttaattatactccagaagcatcaagtggtaggtgaggctgccgtttcagaaagggacagtataagggtcagtccaattgaaaaagcagttctcaggacttgctttagctcattctcatcatagagctttctctgcagaaggaacctactgggtcctccttcctggtccttgaacttctgacctagagtggcttaatcctgctgccacctctctctcacactctgatgccgaatgattccaggaactgggccatgctctggtgggaatgaccttaccctgagcatgtcattcatgcattgaacagcagctgagagcagagctaaggctgatccctataaggagagaagaatcacatcctgcagaagtcagtctagaagagcaggtactgtagccacagcaaagacacagttgatacctgaataacaataatacaagacaggatatgggaacagcaaaagatttgggtgtcagaagaggctgagaacacttcaggcaggaacattcagagttgttcttggaggaagtaggcacgaaggctgggcaggatttcacggggcagagatggagcaaacaattcaagtgaaaggcatggcatgggaaagggagcgctggccacagggagtgcaacattgtgatgcaaggccactgtggagccattgctagcgtattaactgcaaagttttgaattgaatcagaaggtaattggaggcctccagactaagcatttagacacttgagggacatattcacaactgagcctcgggaagattattctgcaagatatctctacaatgacaagatttagtctgtggaaaagggatttttttttggagggaagagggtatgtgtgccagtgtgtatgtgtgtgtgtgtggtccttggactcaaccccaccacctactggcagaaagtcaaggccagctagaaagttttgttcacttctatcttctgtccctaccagaatgccacctgcctgagggaaagggtttttgatcataactcaggattctcagcacctcttatccgatagctttggaatgaatgacaaggccttcataacagccactgcaactgctgtctcctttcctttgctacccctcccgctccagccatgcctgcttcccccaagaccttccgtgctccaggcccaaactccaaagccagcaacttagacaagagtcctctggctttggaaagagggcggcttttgttttcctcctcatgtttcctccccagcaaaatctccctctacatagagaagcctctccttgtggatagtagcaaagccaccaaccttggggaccagccttgggaatctcaaggcttgagagagagagagagaggaaagaaaaagtatcttgctttcgaacaaacaaaaaggaaataaaaagacccgataatctcaaaaggttacttgctgcttgaaatttttgattcggtgtattctacctagtaactgctgagaaataaggctcgacaccattggctggttcactcacacccggccaatcctggactctaaaatacttagggaaatcttgggacactgtggaagcccagagaatctgatcccgggtcccacaacttcacatatcgcgagtaagtgggaggcaaagaaaattctttttctcctcttttgggacagtttgtgactagtagtgcctgtgcccctggaaaggttggagacttgggggacgactggagaattgccatttgaggaccaaaggagaaaagaaactacacgctaattctagaaggtaggaaagggagggtaggcgctacagctccggggtgaaggcggtcgatggaagtagcgggatccgctgtggacttgagagggggttctgggagagggaaagcccaccggtggggcggcgcctcctcgcctggctttacctccggtggcccggcgtggatcgcggggaggaggaagtgaagggaggagggtgtgatagaatccagcgacaactgaagaaaccggactctggccagagaagtgagccgaggagggcggaaaaaggcccccttgatcttggcattgatggcttacttcatggaatgtttaaggaatccctctctcaggagatacctgagccttcggatgcaggggactctctgaagttggggcactgatgagacctacttgagtgacgggagaggttgggcccgaccagcactgaggtgccaagactcctaggctgattctcctctgtaaccctaggcctcctgtccctgcctgctctgggtgctcatggaaccagctgctgccctgcacttctcccggccagcctccctcctcctcctcctcagcctgtgtgcactggtctcaggtagggatgtgtgccacttgctgctgtcacctatcagaaaggatcatcaaccctgtagtctgcaaaggcaaagaaagaaggactgtggagttgttgacttatcctttcattctgaacatgttcactgaatttataccagcactgtccaaaagaaacacagtgaggcacaaaggccaagtgcatgtacaattgcaaattttccaaaaaaattaaattttactttttatttaagaaagtaaaaagaaacatgaaataaatgtgtgtactatattttgtttcaccccaaataaccaaatatgaatatataaatgcttagtcaacattttgaaattttaaatcttcataatcctgtgcgtattttacacttacagttcatttcagttggaactagctagtgggtaggtgccctattgcacggctcaagtttacactacactcaggcacagcgctagattggggaatggaggaaattctcctcatggggcacagggtggacagagggtgctcagggagggctccccagggtttccttcatgaaccagaagcagatttcatagttactgctcccaggggtgctgttgactagccacagctactggtccccagaattctcagcccaaggagaccctatggccgtggaaagaatatgtttgtccctggaatacctgcttcctttcctgccttagagatgtgatggctggtgtctttgtctgattctgcccctttgttgaacagcccaggtcactgtcgtggggcccactgatcccatcctggccatggtgggagaaaacactacgttacgatgctgtctgtcacccgaggaaaatgctgaggacatggaggtgcggtggttccagtctcagttctcccctgcagtgtttgtgtataagggtggaagagagagaacagaggagcagaaggaggagtaccgagggagaaccacctttgtgagcaaagacagcaggggcagcgtggccctgatcatacacaatgtcacagccgaggataacggcatctaccagtgttacttccaagaaggcaggtcctgcaatgaggccatcctgcaccttgtggtggcaggtgcgttgcttcattttgctttgttactttggcactgtgtgactttgggtaaagcttctcttctaaattccagcccattgcagaccagcacaatcctctttcctggatccccattccgcagggacactctccctatgaaaagaagattccagggaaaaatccttcctcctgcacaagggccaccatgagtgagtttgccctgctaagccgtgggcttgacttcttgagaagcacatgcagaactcagttgaggccatgagccggggaaaatggtgaatctcggaagagaagtcctatgcctgccttagcactgagctgtgcacttctgagagtgagaggagacaccatcaataattgtcttgggacaactggaataaacagtgactgcccagagaactacgatatttgaaatcttatttcttgatgaatattcatcctgacttctttcctgaaatgctgtttgcaaagagagtgacttatatgtaagtagagcgttttattaaagcaagacttaatacagaagcaatattttttttgagacatagtctcgctctgctgcccaggctggagtgcattggcacgatctcagctcactgcagtcttcacctcccaggttcaagcaattctccctgcctcagcctcctgagtaggtgggattataggcatgcatcaccacacctggcatattttgtatttttagtagagacagggttttgcaatgttaactaggctggtctcaaactcctgacctcatgtgacccgcccatctcgacctcccaaagtgctacgattacaggcgtgagccactgcacctagcccagaggcaaaattatattcctgctgactccacagagaaagtgtaagaatttagctggcagggaatagacaaggtttcaacatagaaatacatttgaactggaatttctaggagtttgctaaaatgacattaagtgattacctcagtcttggggttagtttattgtgctttaaaagatatatttgaggactgaaaaagcccttcaggtgcaggataatctgtggtggcatttcactccatcagaccagaggaggtgaggactagggaattgggtccttcccagggggcctcaaatcataacaggtaggagaccccatctttgctactcacaaaggcaaacttgcatgtgattaaaacagaatatcatggaaggagggtttcttgatcttgtgtcatggctgtgtttgtagcagcactgcagggttggccagttatggtttctgcgtggcaggaatctactcctccctctctgtaaaactgacactggcctggcctttcccactctgaattgggctgcttaggactttttgtttgtttgtttattgtattctctatgttaggttggttggccggctgattttgcctttaaatctattttgtcatgcttgcctgtattgaacctcatggaatgttttgaagaactttgttctccaatttgctgagttattttaattcttattccactgagcctttaaatgtacaagtagttttatctcttgataaaaattaaaatgagcctgggcaacatggcaaaaccccatctcttttaaaaatatataaaaaaaattagccaggcatggtggcacatgcctgtagtcttagctacttgggaggctgaggtgggaggatcacctgaacccaggaagttcaggctgtggtgaaccacggtcatgccactgcactccagcccaggtaatagagtgagactgtgtcaaaaaataataataataattaaattgagccatagcaatagactaaagttattggcttaatttcctgtctttgccataatttgaagactttacaaaggaattactcagaagaagtttggatgttcacacatggcttaagggtctcctaggaccatgcagctctttcatacctggtattcacttttattgaagattcattaaacatggattgtagttagggtaagtctagattcttaggatttttggtgatgatctctgatattgaaaaagtgatatggttatcttaatcccaagagcatccagatctttctaataaatcgatgttctcaaagcactataagaaaattgcccacctgggcaacactttatctctacaataaaataaaatgttagccaagcatggtggaacatgcctgtaatcctagctagttgggaggctaaagcgggaagatctcttgagcccaggactacagggtacagtgagctatgattttgccactgcactccagcctggacaacagagctaaaaccctgtctaaaaaacaaaagagacattgcctaaaagacggatcctctgggaggtaaacagtatgaattagggttagagttggttttgcaggctaccatgttgaggctcctaaaaaccatcacctcctgtgggtgggagagagctgtggttatgtgaagccctaaactaaacagaaaagtaaatgtctttaggtcaaatggttgcttagtattctgcctgcctggcagatttttgtcctccttgttattcaagagcttctggaagctgaggtctactgagaagtcatcctgggaccagaaagtgaaatccaaaacctgcctgtttgaagtgggagttgacaaacccaccttaagtgagaaaattaatctggcaggataaaatgaacaagcatttatagcagacacatagatgcttggtgctgtgatggggcctgtaggtggaccacaaagaaaagggtgcaattggatcctttcctcttagagagctcacagtttgtgtggccaattggtctgctggtgttctccaacatcaatgttctttcttccttaccctcatccttttcttcttccttcctatttcttgcttcctacttccctctttttttcctttactttctctcttcacagaagagatgcaataggcactgagacactgccttttggctgtgccctggtatctctccccaggactggactctgagcccgtcattgaaatgagagaccacgaggacgggggcatccagctggagtgcatatctggagggtggtacccaaagcccctcacagtgtggagggacccctacggtgaggtcgtgcctgccctgaaggaggtctccacccctgacgcagacagcctcttcatggtcaccacagctgtgatcatcagagacaagtctgtgaggaacgtgtcctgctctatcaatgacaccctgctcggccagaagaaagaaagtgtcatttttattccaggttagttctctgctctctgagactcattgagtgcatgggggatcctcagcacacagatggagcccagagcggggatgggggcagcagtgtgggtggaatgaatggttctgggccctgaggacctggaggctgcagctgatatgaagcttctctaaccccttttcacaaaaggagaatcaaagagtcccaaaactcgggagtaggagcctcttctctgagggcgaacctagtcttttttttttttttcctgcaagatccttatgatgcagcaatttttaaacattgaaaacaaccatgacacatggagggagggtggtgtggataggtgactctctacacttggtgttcctgtatgctgcagccatcccttcctgcccaggggatttcccaagggacagagctggggaaaatccttattgatacacgctcataattcattcaacaaatgctcaagacactgttctagaaaccaagggtaaatcattgaacaaaatatatcaagatctcctccctcaaaaagtgattaaataattgaccatatactctatcagatggtttgaacatctgtaggaaacattaagcatggagggaataaagagaggcaggggcatgagatattgcaattattaacagaatggtcagggaagaattcactgtaaagatggaattgagtcattctgtctgatggcaaggaaccatcagatgcttaaagactgagcaacccagctacaggaagagcatatgcaaagggcctggggaaggaacatctctggcagtttccaggaccctcaggaggtgatgctgttgtggctgaaatggagtgagtgcaggaagtgagaggagatgaattcacagaggcaatgaaaacacatacatggcatcgcaagccacaaaaagactggtttttagagcgagtgacttggaaagcattggaaggatttgagctaagaattaacatgatctcacttgggctggtctgctgagaatggactaccaatggtaagggcagaataagaaggaaggcactgcagtattccaggtatgagtggtggtggcttgaggcagggtggcggctgtgctgactcagcataacgggttagctttatgtacactggtccttcctaccgtgactccagatgtttctgctttgctacctctgggccttggccctggaagccactgaggtgtcagccagggctgagccagcatcactttctccatccaagttttctgagggagaaactaatagagcaggaggctgaggagctcttgagatgtgctgctaggggcactctcacctggatgttctgtttcaaactaagtggacgtttctggcttccttttcagaatcctttatgcccagcaggtctccatgtgtggtgatcctgcctgttatcatgattattctgatgatacccattgccatatgcatctactggatcaacaatctccaaaaggaaaaaaaagattctgtcagggcaaaaggagcttgaacaggaaaggaaagaaactgcactaaaggaactggagaaagaacatgtggaaaaagagaaagaacttcagataaacagtaaaagaggccaggtatggtggctcatggcttgaatcccaacactgtgggaggctgaggcaggcggattacttgagcccaggagttcgagaccaacctgggcaataaagtgagaccctgtgtctaattaaaaaaaaaaaaaaaaagtaaaagagtaggaggacagttcaccattatagaaagaacacagctctcccaggtaccagcatacagaagagagaggaaatgcacagcagcagcagcaaggacttggaactctcatgtccttggaatgaatctctcagagcttttgttctttcattctgcccgcattgcactcattcacctggctacatgaagtactaaatggttgagcaaaagcaagtgtaacaatgtactggtactacccagcccctgatcatatatcatttctggtttctgacagtgccctaggcatgagggaagggagatgttgctgttcatagaaagggctgttcctgctttgcttactataaacccgacttcttttagttcttctgttaaagacatgattttgtttctgtttttcagagcaacttctgaagaattgcatacgtttagcctttcctgaactactccatgtacaatttgtgttctgctcatttagcagcatctcatgacattcaacctctgtctgtcccttgcaggatggagaagaacattcttacatgctggtgagtgcctctgatgctccctcagatctcagctttctcccgctagccagctaacaggactccttagaggagatgagcaaggggcccagggctacacagggatagcagggaattggggtcagttcatcaacagtgtcccagcaatgatgcatcatggctcttctgtcagagaatcccagcagctctcaatccaccgtggtttacatcccaggatcctttctcttttggaataatttaatacatgattaccagaggtttccatatatagtagcctccccaagacttatgcttcagtggtttttgctctttgattctggatcagtttgaaagaagacaatgctgtcttagcaatttatatactaggaatgatgtagactgtgcatagttgaaggcacatgttggcaagaggctataaaggttcccaatcagcttgacagaatggtatacaaataactggccagaaatgcctttctgctcttaagagaacacctatactttgtgtatatatagcctgccaggggagggggttcgggtgggtgggagagcacagaacccaattgcccactcccaatgggcacttcccatcttatgattgagcccctctgcccataagcaccacagaatccaagcttcaccagataccatggcacacggacccttcctctttaggtgaatttcaaaattgccactgtcaacttgggaccaaatagcaaaatgtcacaaccagacatattaacttggggaatggaggaaatcattttaacacaatagaaaggtagactaaataagtaagaataaatgtagatgggggaggccggcagaatgcccggagtctggagcatttcttgcactgacaggaaatgtacctaggtaggcacctacatttcctgtacctacctatatgttctttccccagttcttttagcagtttctttcctttcctattcaaatcccttttccctagacagaatcttttcttccttttggagtttgttgatctaataggtatacagaagtcatacctgcagacatcagacccatgttgttgaagcaaaactggatggaaatagttcctccatacctttgcctacagacccctcaggcagtaggttttcttttggggacatttatttttctcctttatcctcgaagggtgccctcgtcagtcatttaaatcagttgtcatctggtaaaaggaacacataggaccaacgaagaaaccctttatcctccaggacagtgtgaagggaaagactcaccttagttgatccaatggggagaggaggagcaggacataaagcctctgtgctggtttgagccaagttggaaagtttctaactaaagaaagtcccagagatcataggtcttgaatagaaaagggaatagattttagaatgctaaaattgtgaatgattaatttgggctcattccccaaattctctggatttcataaagcctcagttcttctcaacctgagggtgctgcttactgtctctggagagacagaaatgcagcttcagaggccaggatggtggctcacacctgtaatcccagcactttgggaggcagaggtgggaggatcaactgaggttgggcattcgagaccagcctgaccaacatggagagaaaccctgtttctactaaaaatataaaattagccaggcacggtggcacatacctgtaaccccagctccttggggggctgaggcaggagaatcacttgaacccgggagacagaggttgcggtgagccgagattgcaccactgcactcaggcctggcaacaagagcaaagctcagtctcaaaaaaaaaaaaaagtgcatcttcagtaattctcgggtatgagctgcctgggatcagggggccttcgtggaaatggcccctacatggggatcccgctgcagctttctgagacctctcagggcaccaggaaccacacagagttcctgagacttcctctgcagccaatgttgtcctggaccaagacactggtcatccctatctcttcgtgtcagaggacaaaagaagtgtgacattggacccctccagggagagcattccgggcaacccagagagattcgacagtcagctttgtgtcctgggccaggagagcttcgcctcagggaaacattacttggaggtagatgtggaaaatgtgattgagtggactgtggggatctgtagagacaatgttgagaggaaatgggaggtcccactacttcctcagaatggcttctggaccttggagatgcataaaaggaaatactgggccctgacctcccttaagtggattctctctctggaggagcccctttgccaggtgggcatcttcctggactatgaagctggagacgtctccttctacaacatgagggacagatcacacatctacacatttccccattcagccttttctgtgcctgtgaggcccttcttcagcttagggtcttatgacagccaaatcttaatctgctctgcattcacaggagccagtggggtcacggtgcctgaagagggctggacacttcacagagcagggacccaccacagcccacagaatcagttccccagtctcacagccatggaaacaagccctggccatctcagcagccactgcacaatgcctctggtggaagacacgccctcctcccctctggtcacacaagagaacatcttccagctgcctctttcacacccactccagacctcagcccctgttcacctcctcattaggtgtggctttagtagttcctttggttgtaactatgggatggaatccaggcatagggaactagttgttccacagctcccagccaggaagaaagtgtgagaagctgattggtagtgaacctgctgtttaacatcacagtgactacattgaacccagtatgccagttggcaccagatgctgtggacttggaatgaggccaagaggagtcgccaggatgtgagaggagagaggaatccacaggaccaccagagggtgagtgaaccagatatgcaggtcagagatagacgaagtggaaccagagagctgggagggaccaaggttgtaagggtgcttaagccccaccataacagctaaggagtcccaggagatgatggctcatttccacccaaccccaggatttccacagcacacacccacaggcctggacctgggacgaagatgaatgaagaatatggacatgtggatgtggtttggctcacgtgtccctgcaataaacaaggagtcagtactcagtccttgggtgtggttgaggcttgaggtcctgattgagcaaggcagtactggacaaggtctacatcagcattcaagttcaatggggggcactagtggcttcaaacttcctggtctaattatgtctttagacacttaataactactgagggccttgaggagctcttgtttatttgggttgatatttgttaatatttatggcatttgacattaaaacagaaaatgttaaaatgttatttactaattcatgttaaaatataatgaatgaaccaaatgtaggttaatataaatagaatgctttctgaaaaatcaactgttgtgtccaaacaaaaaaacaagaagtgtgacactggttaacttgtttcaaatctgatgtctggcttaatggaagatgtttgtattctcatatctgcttttgtattaaatctgttggtatatcataccctaccaagagaatgagatcaaaaacaacaaatgttatattatgatgatgatgatgatgaaaatagtattaagattggggactccttaggagtatatcagagttctccctagacatccccagaccatgtttggaatagtggatcctggaagtgaatccatgagctgcttaattttaggtgtcaacttgactggattacggaatacctagacaactggtatattatttctggatgtatttgtgagtgtgtttccagaagagattgacatgtgagtcagtgggaaattctcccctcctattggctgggggcccaatataacaaaaaggcagaggaaaggcaaattcttctctcccctgagacattcttcttctgctgctcttggacatcagaactgctggctctcgggcctttgaactttgggacttgtaccaggaagccctgggttctcaggcctttcactttggactgagatttacacaatcggcttccctagttctgaggctttcagacttaaactgagccatactaccagcatcccagggtctccagcctacagacgagctgtcatgggatttctcagcttgcataatcacatgagccaatttccctaataaacacccgctcatcatatgtatctatatctatatggtattggttttgtttctctggagaattctgactaatacaatcaggcatctaaaattctgacttgaatggtagtattttaggtttgagacaattcaataatccaacaggaatgaaaaaaatttaaatagtccaaaattgtattactgcagttacaaaaaggcacattattgaaagaatccagagttgttgcaggaagtcagggaccccgaatggagggaccagctgaagccatggcagaaaaacttaaattgtgaaaatttcatggacatttattagttccccaaattaatacttttataatttcttatgcctgtctttactgcagtctctgaacataaattgtgaagatttcatagacacttatcacttccccaatcaatactcttgtgatttcctatgcctgtctttgctttaatctctttatccctttatcttcataagctgaggataaatgtcgcctcagggccctgtgatgattgcgttaactgcacaaattgtttaaacaatatgaaatctgggcaccttgaaaaaagaacaggataacagcgatgttcagggaacaaaggagataaccttaaggtctggctgcctgtgggccgggcagaacagagccatatttttcttctttcaaaagcaaataggagaaatattgctgaattctttttctcagcaaggaacatccctgagaaagagaatgtgttccgaaggggaggcctctgaaatggctgctttaggaacgtctgtcttttacagttgtagataagggatgaaaaaagtcccggtctcccgttgcgctcccaggcttattaggaagaggaaattccctcctaataaattttggtcagaccggttgtctgctctcaaaccctgtcccctgataagatgtcatcaatgacaatgtgtgcctgaaacttcattagcaattttaatttcaccccgtcctgtgatcttgccctgcctccatttgccttgtgatattttattaccttgtgaagcatgtgatctctctgacccccaccctattcatacactccctccccttttgaaaatcactaataaaaacttgctggttttgtggcttagggggcatcacggaacctgccaacatgtgatgtcttccctggacacctagctttaaaatttctctcttcgtactctttccctttatttctcagaccaggtgacacttaaggaaaatagaaaagaacctatgaagaattatcgggggcgggttcctccgatacagagtgattctttcaacctctggggttgagggccagatcatatatgcccctgaaagtcatcatgctaacctgggctttacctgtgagaggggagccactggaaggcttggcagaaaaaaaaactggacttacttcagatgctagaccaagatgggctatgtgtaggggtggtggatggaagcctgaagacccagctgggagctactgcagtgatccagaggggagatgccgatgacttgtaccagggaggagccatggaatgatctgatgctggatttattttcaagacagagtaaaaaggctttgctggtaaacctaaatgtgctgtgtgaaaaaggaggacatcaaggatgaccataaggttttaatcctaagaaatggtacagatggagttgctacttatggagatgaggaaactgagggagaagtccattttggaggccagaggaggagccagcatagaatccaaggtcagttttggatacgttcgggttgaggagcttactagagatccccgtggagatgcagagtaggcaggtcaataataaatgtgcatgccaggcacagtggctcatatctgtaatctcagcacattgggaagccgaggcaggtggatcacctgaggtcaagtgtttgagaccagcctggccaacatggcgaaatcccatctctactaaaaatacaaaaattagatgggtgcagtggcatgcgcctgtaatcccaactactcaggaggctgagatagaagaatcacttgaacctgggaggcggaggttacagtgaaccgagattgcaccactgcactccaacctgggagacagagtgagactccatctcaaaaaataagtaaataagtaaataaataaaatgatagcaataacaattaatgtgcagtccaggcaacaggtcagggctggaaacacaagttattctttctgtattctgtatcttcatgattgttgccactgcctgtttcaatttaatgcattagtgatctattgctgcttaacaaattactgcaaacttagtggttcaaaacagcagacatttgtcattttagtttctctgggtcagaagtccaggcagaccttagatggcttctctgctcagaactttacaaagcaaaagtcaaggtgttggccaggctgtatgtagcctcatcttgtcttgactgtgggagagtcctcttttcagatcactcaggtcattaacagaattcatttctttacagttgaaggactccctgcaggctgaagctggaggctgctctaagctcctacaggccacctcagctccttgctatgtgggtctccaacgatgactacttttgtcttcaaagccagccaggaagacagagactctagagtgggtcagctagcaagacagagtcttacactacattatgtagtcatggaagggacatgccatcagctttaccatattttattggttagcagtaagccataggttcagctcacactcagggaaagtacaggctgcaaactgcaagaggagtaatcataaggggtccactccagagtctgtaggctacaccatatacaagctcaaggttctcccactgtaactgccctgcttcccctttcccagggcaatacaccacacttgcctttctctaggtctctacttccatgaaagcaaagtctcagaaagagaacacatgcatggccgtcaggcactgtttgccatgatgatggccactgctgtaccacaccataaacattgttttacagttactagtggattcccaatcattaaatccattatacatttctattttcccctcccaccgccatgctttttttttttttttttttaagagagataggatcttgctctgtcaccccccaggctagaggtcagtgacgtgatcatagctgagtgcggccttgatctcctgggctcaagtgatcctcctgccttagcatcccatagtgctgggattgtagctgtgagacactgggccttgcttgtctttatacacctctgtcctttctttatggacaaccctgagttcttcatagacctgcctgagtaggtgttcctgcctatgtggcatctgcctcatcaatccccagggccctcttcttggtctttccctgctcctagggagatctttctcagaattcttgctccacttgctccagaactgctgaaattccttaggctttggtcctgggctctcatttcacaccacatatactcatatggtccaatccattttcagagcagacccccactggcacctatcccataagcagacccccactggcacctgtacttctgtctccagccccacacattccctgaactcagtgcccactaggcatctcacaatgagtgtatccaaaataaaattcccatcaaccctgcctacccatcatcatctgaatgactgacaccacctaagagtcattttagccttctcttgttctctcttaacccaccacatccgactgatagccaagccctgctatttgtacttcctttcaatagtccagcttagtggtttgatcaaagactctggagtgagacagcctgggctcaaggcccagctcagaaagaaactacttgtgtgaccttgggaagtcatttaacctccctggacctcagcttttacgtctataaaatgtgggaaataaggtacctcttagtgttgttgtgaatcttgttaatatatgtaaatctctaagcacaatactagcattgtagcaggttctatgtaagtatttcctagtattaatgtgagtaatcaatcaagtcccctctcctccattgccaagctgccatcatttcttgcctagagtgtcacagtagcttcctttctggtctccctatctcctaacgtgtggcccaccggatgaggatgggatatattgtgcaaccccagcaggcatcatcccatggaatacaatgtaaaaggtgccccctacctcccatcttccctggcacctgccccactgctattttcagtgtacacattttctcacgtcatacttttcagatattttcccttcaccttcacactaaaactccaactcacagcaggcaactgtcgatgttttctccaggggaggtggatttaggagtcatcaatgcagggatcagaattaagcctttcagaatggaagacaatgaaattcatttagggttaatacatgcaggtgctgtgctaactcttccttaaataacttatggaccatgtctcatttccactatagacaaagaaacagaaacattgagtgattagttaaccagctttgggttccagggctaatgagttgtgcatgacaacagatgaagatagaaaaaaaaaagcctagagagagtagatagtaagccagtgtgcctgggacatgctgacagatatctagatgtagcataaagaaaatttgtgttcatgggaggtcctaatggcagcaagaggtgagataaccatgagaaatggacatttcttggtgagactaactcgataaaggagacaaatctctgggcattttgccacacctactgcatgcaggacactgcactagatcttataaaagataaagagaagatagcatcaagtgcctaggtcttgaaggagggctgagtgcacttttcatttagcgtacattcttatgacttacttttttatcatacactgttgtaagcaaactgcatgtgttgtctcattccatgctcacagcaacaactcttaaaagtcaagtactattactgtcattattttacaggtagggaaactggggcacaaagaagttagagaactggccaaaggtcacacaggccacctggcttcagaattagtgctcttatccactctattatgcaacctctcctcactagttttgaacttcagtggctgagacctactacatggtaggttctcaataaaaatttgttgaatcactgaattcatttctgccccatttcacatccatttctttcccaagacttctttgtcagagttcggtataaaggactgatgagaaatggacccagggcctcacactttggaaactacaaagttcaacgatacaaactattggtcccagaaactcctaatctgaagcttagcacctcagctgctgtgtcaaaaatgacttggatccttcaggcaagggtggggtgatcattcttactgatataatttcaagcagcacagcttctgatagactgtgaatttaaaaatgagcaaatgggctgggctcagtggctcatgcctgtaatcccagcactttgggaggccgaagcgggcgtatcacctgaggtcaggagtttgagatcagcctgggcaacacggtgaaacccagtctctactaaaaatacaaaattagccgggcatggtggcacatgcctgcaatcccagctactcaggaggctgaggcaggagaatcgcttgaaccttcggagccggaggatgcggtgagccgagatcgcaccattgcactccagcctgggcaacaagagtaaatctccatctcaccaaaaaaaaaaaaagaaaaagaaaagaaataaaaatgagcaaatgaacatttaaataaataagtatgatggataaatagggaatgaacagtggtatggattataataaagtaagaaagtttcgtaaaatattaagtatatcactataatctacatggtaggcatattggtattcaccaaaaattctttcacctttgctttatgttttagaagtgttatggtaaactgttgggaaggaaaagggggagggaagaattgtgggattctgttggtaacagagaccagaaataccattggcttaaacaaaacaagggttttcttgttttttcttgatgttgttgtttgttttcatgtaaaatgaatttagatggcggtagtccagggctgacctggcagctcagagatgtcattcatgccccagcctgcttctgacttcattctctgctgtctctgcatgtggctttcaacctcaaggttgcctcatggttctaagagggctgccgcacctctagttcaaaagtctacatccaagacaagaggaagaaggaagtacggagagtgtacactcacactcccagctatcttggcctccattctgaaggatctctgggagaaacacaagcccacaactttacctacaaactattgattccaacttagtcccttgttctctggtatctatgagatagcagagcctattgaagtacccaagaaaattaggctttatcaccaagaagaaagggggactgcatgatgcagaagggaccagccatctcaaccagatactgcacagcctaaattcaaactgttacaatataatcaaatttcatcaaccccagtcacatcttaatcttaggagttttgatcactgacttgcaaatccaaaaagtgtgttttgaggtcctaggccacaggaagaaccagtttgtctcacagacctcttacagagatggcatttgtagtctatctagattccagcttcagataatatgtactccactggcagcacgagaaataaatacacaggaaaatacaatatagcacaaaccaggagctgagggcgaatgaagatgctcagaaacacctgcactaaaagtttcctgaaaaaggtaaaaaatgtcaatcagcactgcctctggaaaccagaaacattatattatttgataacagatcctaagtctggatgctggaggtgcttaaaaatgtgcattgcgtctggctttctttccatgtatacatttatttgacgctgtagtaaaatctcctccttcaggtacccatattcatgcaagcaaatgttagcaaactgccacagtagcattttaattagtgcacaactttctctcttcaccacattataatcttttctcattttgttctgctgctatttctattatgataaaagacttaagtaaatatgtagaaatacttatatacatggacacgcaataatgattcaaatagataaacacagaaacacaaacactaagggaggtacggctggaatttttctgcaacgtgtacaattcaatgtactttcacttttcatttcaaccctcctcagtggtttcctcccagcaactgatgagaaacatcacctctgagccaatcaaaaaactaattcttccaaaaagagattgttattattcctcacaataaccagatagcctctgctttctttttcctttcttcggaatgagagactcaaccataatagaaagaatggagaactattaaccaccattcttcagtgggctgtgattttcagaggggaatactaagaagtaagtggggaatgttgattagagcctgggctacaatgcctgggaggacaagagctgaatcgctgagagtggtgagtgggcatgcagggagagtacttgcccagggaaaggggtgcagtgcctctgtgtgtgtgtgtgtgtgtgtgtgtgtgtgtgtgtgtgtgtgtgcgtgtgtgcgcatgggcacccatgcacacatgtgggcacatggagaagaggcaagtagtgcaaagaataaagacctgcagatattgggatttggtggaaggagagggagacaacataaatgaagaaatattccaactgcatgttcttaagaacttattgtggtcagaaaagggcaaaaaagtcgctaaaatctgttttggccaacacaagccatctattctaagagattctagaaagagatgtgccttatagattcatatgtaaatttgttcattacagaaatacttataatatagaaaaatctgaaccagcatacacatacaacaggcagggggtagacaaacagtgcgtggctctatcataaaagagatttctatgcagcttttaggcatcatgtttttaatgaagggcaattatttctcattttaacagcattagatccatacattaaaccttgttttgtatgttttaggtacagtatctgtttttccttccattaatcatttcctcataacccaatatatgtgtttcaatggacacaatctatttcattgtgtgaatatataattattttgtaatactttactaattttggctatttcaattatctacatttggctactgtatagattttattatatttaacaacctcagacataaatttttgtcttaatttctgtcttttttttttgcctcaacaataattcctataagtggaacttttgggtaaagcatacaacttttttttttaatagcatttccttggtagagcatgtaactttttaaagatgcttgctgtatatatgaccaaaatgctttgagaaatatttatatttctactaccaaagtatatgattactactacagagttttaattttattgattgactaatttgtagaaatgggggtctcattatgttacccaggctgttttaaacccctgggctcaaggaatcctcccaccttgaccatccaaattgctaagattgcaggcatgagccactgaacttttattcctttatgcttttcttcatttgcaatattgactataatcaggaagaaaatataaacatcctttaaaaagaatgaaaacatatgtctcactctaagcagagcagagaaattgttaactttgaaaccagtgataataaaaatgataccccttctatagcaacataaagagaagttttgaggaacagaagatgtgaaatgcaatatttagtctgggtcagtgcaagatccaggcgagggtggaggatggccggctgcacagacctctgttccggtgctttctcttcatccctccccacctccctctgcagaccttgttctcagaggccattcccagactcaggtagctacagcagcgggtgttgtggctgcaggcctcatgctcctttgctttggaagaaactgttgaggagttagtatttactgagcagcttatatgttccagtcagtattatcactcataataattactgttaagtaatacatgaaaaatcttaaatttaaagcatttcaatattttaaaagtaaagggagcaaaaggccaacgtgttcttttgctcacttaacttccgatcttcagtttagcatgcatctttttagactttttcaggcgtttacatctataaatatgcagaaatgtatagctttgtttttgtttttcagttgaatcattagtgtagttctgcaacatgctttttgaccgcttagtgtatcaccattatctaggttcatgacaataaatcaactctttttacctgctgcattgaattccctctgagggatgagccgtagttcctctaaacagtctcctgttgggtggctggttcagtcggttaccacttttatactttaaaaacagtgctgcagtgtcattctcacagaggcttctctctgcactcatgcaagtactttgctagactagacatcagaaagtggaattgctggacccaattgtgcacattcgaaatttcacacttcatgatattgtatgaatcaataaagttccaatggttttgtcccatgaacaagatcacacagcttgtgaatcttagagcctttacctattgcttaccttctttatgtccttaacactaatatagtaggcctcacccattgtgggtgctcagtaaatacttgttgaatgactttatgaagggaagaaagaaaagatgagtaaggcctggtcttattcaaagctctcctaatcaatatctttgtgattaaacgtggtgggttcagcccctgactgacttcagagcctctgccaggcagtctgcctggatcccaccaggagccaccaggccataagttgactgtagtaatggccaagagtttgatgcttgaggagtccacagtgttggacacccacagagctgaacaagggtgggaccagggaatccagtgaagagggtccttcatgaatcagagggggatgatggaagcttggacctggcaagggaagtgtggggaagtgataggattatgaatattttaatattttaatgcagtagagtcagagatgtcctgatcagataacagatattatttttacagatggttttccatactggaacccaaaggtaaagacactcaaggacagacatttttggcagaggtaagatcttctttggtcaccatacttgagttagccctggggaagtggacatttccatgcagaagcctaaagcttcttccaggccatagtgtctgtcccacaccttctggtatctcttgatatgcagcatagatgaaaatggcaagttccctggctttccttctgctcaactttcatgtctccctcttcttggtccagctgctcactccttgctcaggtagggaatgattccatgattccacatttatgtttctgaagcagacaattatctcaattacctaattaagcagacaattacctaaatgccctcttagaacctttaactcattcccatacctggaagtccatcccaacctgaaggaccacctgtcacaaagagacaaatggtccttctgttaggattgtgttcccctctaggttctctgtatctcgccttccctgtctgagaaggacccttcctctcgtgaccccaactccaaaaccctctgatggagcttcccccttgtgctgacagctcagttttctgtgcttggaccctctgggcccatcctggccatggtgggtgaagacgctgatctgccctgtcacctgttcccgaccatgagtgcagagaccatggagctgaggtgggtgagttccagcctaaggcaggtggtgaacgtgtatgcagatggaaaggaagtggaagacaggcagagtgcaccgtatcgagggagaacttcgattctgcgggatggcatcactgcagggaaggctgctctccgaatacacaacgtcacagcctctgacagtggaaagtacttgtgttatttccaagatggtgacttctacgaaaaagccctggtggagctgaaggttgcaggtgagcctccaggttttgttctgagaacacttctctgtaggatctagagcagatgcagagtccctcttccaaaagtactgcagacactcctggctgctcactagcaattgtctgcactgcctcccaacttagcttctctgcaacccttaagaaagacacattctttctttagaaagaattcctgctgtaccttacatgccgaagtaaacaactccctccctctgacaaccagagatataagggaaatgaaggacgacggataggaaacattagaaatcatctctttagtgactggtacacagtcattttggtttagtcatgtaacagacggcttctgttgtgtctccaagtgcacgttaccgtgggtcctgggaggtggaatggtgactgtatctgctgccagtgttttccaatcagtgactcccagaaacatttttgtagtataatgaggcatgtttcttacttgttgctttgaggaagaacacacatcatggggagctgtggcgaggtctcagtaaggttttagagcagatttattttacaatttgggcttgtgttaggggatttgggggagggtttatagacttagctctcttctctggatgagatactgtcaggaaggtgtggggagatgaattctgagagtgggagccttaatcaagcttatctaggaggaaggagactagggtgagactaaagctgtaaatgatgaagaggcagcaattcctcattgctgatgggggatgtttggttattgttgtggtttgtacaatgttcatgtttttctctgcactcacaaaagattggggtggtcttgtatttcccatgatctgtcacagtgataaagtactattttttgtgttctgtgaaattacttatgttcaacaggaggataccaagacctggtatcaggttccagacgccgaggagagcttttttctttctcagtgcaatcccttgcctcatggcttctggttgggtttggtttaaggggagctgtagcagacaatggtaggaagaagagaaaagggagaggtctgggtgcttattccctggcttccttcctgcaagattccctcaggctggctgcattgccttgctgaaggtcacaagtcaactcaagaaagtcctcaatgcatcaatctttttatgtctccggaacagatccctctcctcctccctctggtaattggggtggatgggaatagccccacattactgaccctgggatactgcactagcccatttagttttcttttcatcatgaccacacttgtgtaaatagctcctgaatgaaatcttccttggattatcaaatgtgagtctgccattgattcccattgagaccctccctgatacaggagctctcaagaatttagggcaatttatccttctacagcattgggttctgatcttcacattgaagtgaagggttatgaggatggagggatccatctggagtgcaggtccactggctggtacccccaaccccaaataaagtggagcgacaccaagggagagaacatcccggctgtggaagcacctgtggttgcagatggagtgggcctgtatgcagtagcagcatctgtgatcatgagaggcagctctggtgggggtgtatcctgcatcatcagaaattccctcctcggcctggaaaagacagccagcatatccatcgcaggtcagtaccctgcttggcctcagctttactgagctgagctgtggcaggtgatgaagggggatgtgtgagtctctactgtgtgagtctctgcggtcaacctgggtctctacaatgcatgtaaggctcaaagcagggacctgaaggctactcactgctttaggggagcttccccacgccacaaagctgttcatgccacaaacatttactgatcacttcctgtctgacagaaacagaaagtgtgacaggcagtgggaattggggaaaaacattaagagaagctccttatgtaaagtcaaatgacaaaatgggaaaacatatatatatttacaaactcatagagaaagagctaatctttttgaaacagaagagtttgaaaactgagtaaaaaatattaacaaaggtcatgaattgttaattcacaggaaaagaaataacccacaaaagagtgctcattctcactcattagggaaacatatctgaaatcatttttcacttatgatattagcaaaaatcaaaaccccactgccttgcttgataccacatggctatggcaggagtgtaggaaggcagtgactctcagtcatttgctcgtgtcacttgtatttttggtgtgcattagcacaagctctattgggggatctatccaaactacatatttattgatccaaaattccagttctgggatatgcttgcatttgtatgagatgatccatgtaaaaggtttctgggggtttttttgtttgtttgtttgtatgttttttgagagggagtctcactctgttgcccaggatggagtgcaatggcgcaatctcggctcactgcaacctcctcctcctgggttcgagagagcctcctgtctcagcctccccagtagctgggattacaagcatgcaccaccacacctggataatttttatatttttactagagatgtggtttcaccatgttggccaggctggtttcaaactccagaccccaattgatccgcctgtctcagcctcccaaggtgctgggattacaagtgtgagtcaccagcccggcctataaaaagtttcttatagcattgattatgattgtataaggttagaagctatggagatgctcactgatggtgaacttccatacaagggaatactgcccaactgtgaaagaaaaaagagataattctctctacactaatatggaaagatctccaagacacactttacacagaagagtgagatgcagagtgatgtgtatagaatgttatttttagtttaaacaagaggaaaaataggaacatattttaatttactttttttagttcttgattctgttatttaacttacatttttaaaatttaacaagcaattttgtaatactcactgtacatcaagtactttatttacttatttagagacagagtctcactctgtcacctaggctggaatgctgtggcacaatcttggctcactgcaagccccgcttcctgggttgaagcaattctatagcctcagcctcccaagtagttgggattacagggacatgacactatgcccagctaatttttgtaattttagtaaacatgggttttcaccgtgtcggccaagctggtctcgacctcctgacctcaagtgatctgcctgcctcggcctcacaaagtgctgggattacaggcatgacccactgcagcccattaggcccttttaaagtattaatttaattcttctaacctcaggagataggcattatcattaccctcattttatagattaggccactacaaacagagaggttatgtaagtagtccaacatcacactgctagtcacataggggagccagcatttaaacccttgccctctgactccacagtttatgtccctaagcatcatattaagtggactaaggaaaagttaatagatggagggagggagtactaggtagatgggagagttgcataactttatgtacatgaagtttttgaaccatgtaaatgtgttactggttgaaaaaatatttagaaaaaaatgagtatgactctgctgaagttaatttccatacgagaggcagacctctcaagatagtaatagtagtagcttgtagtgagggtttaccaaagtcctctctacagtcctctgagactttagggacagaacgcttatttaacctcatgagatggattccatgcccccaacctgggctgagcagctaaagcttggggtgctgaggctggggaggctgagtgcactagctcccatgacccacagctctccccttcgcagaccccttcttcaggagcgcccagccctggatcgcggccctggcagggaccctgcctatctcgttgctgcttctcgcaggagccagttacttcttgtggagacaacagaaggaaaaaattgctctgtccagggagacagaaagagagcgagagatgaaagaaatgggatacgctgcaacagagcaagaaataagcctaagaggtatccaacgcaagcagagaatctaagcccctggcttgcatgccccagcctgaagatctcacccccattcccaccctgacactgcatcaagtttaaggtttattttcccaaaaccccccttacccataactgttctttttttcttttctttttttgcttattttccagagaagctccaggaggaactcagtaagttcccattccccaggagacccaggcatgtcttcttatccccactttgagcaccttgataacccttccctattcattccattgcagagtggaggaaaatccagtacatggctcgtgagtgactctgacattttctctgaatttgaatcttgaatctatgactctcttctgcttggaaattttccagcccataagtctttgcccagggttgaaaaatggtcctagatccctttactcaggaaaagaaaataagtttggctctttggagaaaccacccagaaggagtctctctctctcgtctatctctctctctaagaaaagaaaaagaggtcttcaatctctttgtactaggggccacagacctttatgccctaaaaagcactgaggaatatccaggggtacacttcaaaaggaagagagaaggatgaggtgcattttctgtggcaggaaacttacttgttgttttccataatctagaggatgttgaaaggaaaacaagaatggaagatttaagagataagaaaatcagaaaagagagagggagacaagtgtgtctaataaagaggaatagctacagtggctcagttggtacagatttatcataactgctttcaaaaactagtccctgaaattgctcattaaatttcccaaattctttttagagcaaggtaggaaatgatacagattgagaagggtggatcttgtactcctagacatacacatatagacatggtgacacctatgcccaggtacaggagtatagacagattcaaaatagattagctggactccactgggaaggaactctcacagtgactgccctgccactagcattcaaccaatgttcccagacttgatattaagaagaagaggtgaagagagaattgagcttgcagagtgagaccacagggaagagtggaatggtcaaaaagaaagtctagatggatgcgaaaggaagtggaaggggccaacagagcaaaggcagtgttcaggtgacacctctatctttctttcattgtaggtggagagaagtctttggcctatcatggtgagtgagcctgatgctctctgggtttgctgggtcatgtacaatgaacatttcaactttttctctgctgtgacccattgacgttctcagttggattaatcagatctaacccttagactcaattttgcatggtagggggttgacttctgcttttctggagcctctgagagactcctgaccctgcacatgcccaggcaaagcataaccatgcagcctgcaccccccatggcacagggagccgagcctgacattgtttagaaggtgccacctctgatctatcagagctgtagaggaaggaagctgaagcctggaagagactctgaagaaaaggagagaaaacgtgtagtgaaaggagaatggagtggagaaaagaacaaaaatactgacctttttcttatctgtgtctccttcctttcagaatggaaaatggccctcttcaaacctggtgagtaaatcactgtatgttccctggatcaacaacctgagggactatattcctttctcctcctccaactcttgtgatttagggaagaaaagttcccttgactaagaaagtttggggtagacaacattaaatcccaatctgaaaagtgggcccatctccaagacccttcccgctgagagcccagggaaccagggagaattgctctcttgggcttcctcagaccttcctgggaaggaagacacataaagggtggagctgaggggaaggagacacacactgagtgatactgcagggagagtgaggatgcaaatgccaaggagaggaggtgatgcctgcccaaagaactttgcacttcccaggcttctcatgccccctactgcctgtgtcacctcaaatgatttaatgcttccgagctttcgcctccacatttttaaatgaaaattgcaatctgtgttttgtgggggtgaggtgaagactgaagtaataataaatatccactggtcaaaaaccaagtaagaaagagatgacaagttcaaactggttggttgaaaaaggtttgcggaaaggagggataagggtaagcaataaggaaaagtgcagtgcccccatggttcccaacagtggggagctgtcttcactcctagcctgggaggtctaggaaggggaggcagttactggaacccagagaaaagtagctcaaaagagagggctccctgagaagagtcgtcaggccttgttagagtagcatcagctgctgctggcagggaggaagcaggagaataaacagtgtgtctctcctttctttctccttccaatcttctatcagggcctcccattggccaaacccaacagcaaaccagaagacaagggagcccagtggcactatccttagagtacagattcctaggacccagaagagggtggaaaaagctgaaggctggagagtgaatctggggcccctcatagagcccagcatagagacggccttgcagctattagaacatcaggagcttccttcatgccctgctgtgggctgagtaaataacatgattcccctatactacgctagagagtcatatttttatccccatttttcaggtgacaaaatgcttcagatgaggctccaccttgttaaataaattggatgtatggaaaaatagactgcagaaaaggggagctcatttagttcataagcggtcgagtgaagattgaaaattaacctctgagtataaggcattagggggcagagtcaatgtggggagggaaacaagaaaaatgtagcaagaggatccttattgcttcctgaggcagcatcagggtattgggttaggcagatactgaccttactttcatttcccctctggacacaagaccccttgagctttctcccatgacattgatgagagagtcatatttagagcaggctagggacgccaggttctggaaggacctccttagcatggtccaggccttgcatgctgaggctctgaaatccaggaaaaatggctgaccccatggacacctcctcaaactctctgcagcggatgtgattctggatccagacacggcaaacgccatcctccttgtttctgaggaccagaggagtgtgcagcgtgctgaagagccgcgggatctgccagacaaccctgagagatttgaatggcgttactgtgtccttggctgtgaaaacttcacatcagggagacattactgggaggtggaagtgggggacagaaaagagtggcatattggggtatgtagtaagaacgtggagaggaaaaaaggttgggtcaaaatgacaccggagaacggatactggactatgggcctgactgatgggaataagtatcgggctctcactgagcccagaaccaacctgaaacttcctgagcctcctaggaaagtggggatcttcctggactatgagactggagagatctcgttctataatgccacagatggatctcatatctacacctttccgcacgcctctttctctgagcctctatatcctgttttcagaattttgaccttggagcccactgccctgaccatttgcccaataccaaaagaagtagagagttcccccgatcctgacctagtgcctgatcattccctggagacaccactgaccccgggcttagctaatgaaagtggggagcctcaggctgaagtaacatctctgcttctccctgcccaccctggagctgaggtctccccttctgcaacaaccaatcagaaccataagctacaggcacgcactgaagcactttactgatattcattccattattccatatgacagttgttttgagtttcgtaccaccttattgtccccttatacagataaggaaactggggtgcagaaaggtgaattaactttacaaagtagacatgacaagtgaacagcagagctgggatctaaacagcaataactaacattaacagagaatttaaaatgttcttagtgctgtgttataagctttggtggatgtcactcctttaatcctcacaacaccctgtcgggtagtcatattttgcaagtatggaagctgaggcagggcaacatgaagtaacttacataactcatacagtaatttgtgcagttgggagatgttcagccttagtccctggctaattgcctgttcttttccagcctgattttttttcccacaggaagagcccacatgtagccctgaggtttccttcccaggacagctgcagggtagagatcattttaagtgcttgtggagttgacatccctattgactctttcccagctgatatcagagacttagacccagcactccttggattagctctgcagagtgtcttggttgagagaataacctcatagtaccaacatgacatgtgacttggaaagagactagaggccacacttgataaatcatggggcacagatatgttcccacccaacaaatgtgataagtgattgtgcagccagagccagccttccttcaatcaaggtttccaggcagagcaaataccctagagattctctgtgatataggaaatttggatcaaggaagctaaaagaattacagggatgtttttaatcccactatggactcagtctcctggaaataggtctgtccactcctggtcattggtggatgttaaacccatattcctttcaactgctgcctgctagggaaaactgctcctcattatcatcactattattgctcaccactgtatcccctctacttggcaagtggttgtcaagttctagttgttcaataaatgtgttaataatgcttactcctcagcttggctttttctagactgtggtgtctactcagcacagtagtctgcacacccactgtactcaccacagtctcagtttacctcactgcagcattttcacaagacccttattggatgcattttctgttgttgccatctgaattaccagaaatgtatagacatttttttttttttgagattggattgtgccactgtactcccaggctggagtacagtggcacgatctcagctcactgcaacctccacctcccaggttgaagtgattctcctgcctcagccttccgagtagctgggactacaggtgcgtgccaccacgcctggctaattttttgtgttttcagtgcagacgaggtttcaccatgttgtccaggatggtctcgatctactgaccttgtgatc

SEQ ID NO: 745 - DNA, 1945 bp, Homo sapiens
agccatctcttcccaaggcaggtggtgacttgagaactctgtgcctggtttctgaggactgtttcaccatgcagtggctaatgaggttccggaccctctggggcatccacaaatccttccacaacatccaccctgccccttcacagctgcgctgccggtctttatcagaatttggagccccaagatggaatgactatgaagtaccggaggaatttaactttgcaagttatgtactggactactgggctcaaaaggagaaggagggcaagagaggtccaaatccagctttttggtgggtgaatggccaaggggatgaagtaaagtggagcttcagagagatgggagacctaacccgccgtgtagccaacgtcttcacacagacctgtggcctacaacagggagaccatctggccttgatgctgcctcgagttcctgagtggtggctggtggctgtgggctgcatgcgaacagggatcatcttcattcctgcgaccatcctgttgaaggccaaagacattctctatcgactacagttgtctaaagccaagggcattgtgaccatagatgcccttgcctcagaggtggactccatagcttctcagtgcccctctctgaaaaccaagctcctggtgtctgatcacagccgtgaagggtggctggacttccgatcgctggttaaatcagcatccccagaacacacctgtgttaagtcaaagaccttggacccaatggtcatcttcttcaccagtgggaccacaggcttccccaagatggcaaaacactcccatgggttggccttacaaccctccttcccaggaagtaggaaattacggagcctgaagacatctgatgtctcctggtgcctgtcggactcaggatggattgtggctaccatttggaccctggtagaaccatggacagcgggttgtacagtctttatccaccatctgccacagtttgacaccaaggtcatcatacagacattgttgaaataccccattaaccacttttggggggtatcatctatatatcgaatgattctgcagcaggatttcaccagcatcaggttccctgccctggagcactgctatactggcggggaggtcgtgttgcccaaggatcaggaggagtggaaaagacggacgggccttctgctctacgagaactatgggcagtcggaaacgggactaatttgtgccacctactggggaatgaagatcaagccgggtttcatggggaaggccactccaccctatgacgtccaggtcattgatgacaagggcagcatcctgccacctaacacagaaggaaacattggcatcagaatcaaacctgtcaggcctgtgagcctcttcatgtgctatgagggtgacccagagaagacagctaaagtggaatgtggggacttctacaacactggggacagaggaaagatggatgaagagggctacatttgtttcctggggaggagtgatgacatcattaatgcctctgggtatcgcatcgggcctgcagaggttgaaagcgctttggtggagcacccagcggtggcggagtcagccgtggtgggcagcccagacccgattcgaggggaggtggtgaaggcctttattgtcctgaccccacagttcctgtcccatgacaaggatcagctgaccaaggaactgcagcagcatgtcaagtcagtgacagccccatacaagtacccaaggaacgtggagtttgtctcagagctgccaaaaaccatcactggcaagattgaacggaaggaacttcggaaaaaggagactggtcagatgtaatcggcagtgaactcagaacgcactgcacacctaaggcaaatccctggccactttagtctccccactatggtgaggacgagggtggggcattgagagtgttgatttgggaaagtatcaggagtgccataatcactagtgaattc

SEQ ID NO: 746 - DNA, 1605 bp, Homo sapiens
ggcacgaggcctcgcagcctcctgtgcgtccgtgtgtcatctctgctgcggtcaggctgtgagctcgtgaccactcctctctcagctgtccccagggcccagcacgaggcaggcacctcttccctgaggacagaccctgcctgccttgttcactgctgatcccacagcctgacgcggtgctgggcacagaacaagaggtgaaaatcagcactccatgaatgaaggaatggatgaaggcctcgctaagggttgtctaagcaaatgcagacagcagtctccaaggcagtggaaaccagaagctctggcagtctcagagcaggagccagctcaccagttcatttgtagccgtggttttttttgcacacttactagcgggcattgaaagtcatgctcatggtcccggcgggtgtttggtgttgatcccaacaatgagccacccctcacctctggtttctctaatttcagatttgagaatggcagtgagtttccctcagagctggaggacggggacgacccagcagcctacgtcaccaacctgtcatattaccacctggtccccttcgagacagacatttgggactgaacctctctatcaggcctcccccgcctcagctgttcactgccagctctgatgctgtccactgtgctggcccccatggtcacagctgctgacccagctctggaactcccagacgtcccaggccccactgacgccaggaggcctgggtgtcctgcaagtggagcagcaggggctcctagtgggccaggctgaccgcagagtctccagcaagctgaggtcacagccggaggccacagggcctgtgttctgagggtcttcactccctgcttggtgcccacagggctgcgcactgccagggcagggacagttcctgtggggctcgctctcactgctactgcttcctgggaggtgcatccctcttggtgaagtggcctagtgccccccagccaccctgactccccaccattccctcccacggcaaacgcacaaaacgtcttgagggagattttgacaagtcacccattccaggtgccacaggcaggggatgtttagtaatccaggatttctctgagaactgggatatgtggcctttttttttttctttttatcttttatctggaaactgggtttgggtcaaccccaggagtatttgcagaaggcccagcacagtggggggtattggctgcagggcagggaaggcattgccgactagataaccgtgtgagcttggactgagcgttggtggttcttcccaaaggaaaggaatttctcccggcctgccaggtctctgggccttcagcgcgggtcctggtgctgcggccacaccaccctggggtgctcattgacagagctgccataatgaacttgaaaggacgggaatcacgagggaagctggggctcccctgcccacaggagaggatccccgttcttcaagcttctctgctcagtgtctactaacgaccgacatttgctaatgtaaataatagtaaattattgagaattctaattcttttacacagtctgtttttaatctattttaattaaataaaatctatgactctaaaaaaaaaaaaaaaaaaacgaag

SEQ ID NO: 747 - DNA, 1477 bp, Homo sapiens
atgaaatctcaaggtcaacattggtattccagttcagataaaaactgtaaagtgagctttcgtgagaagcttctgattattgattcaaacctgggggtccaagatgtggagaacctcaagtttctctgcataggattggtccccaacaagaagctggagaagtccagctcagcctcagatgtttttgaacatctcttggcagaggatctgctgagtgaggaagaccctttcttcctggcagaactcctctatatcatacggcagaagaagctgctgcagcacctcaactgtaccaaagaggaagtggagcgactgctgcccacccgacaaagggtttctctgtttagaaacctgctctacgaactgtcagaaggcattgactcagagaacttaaaggacatgatcttccttctgaaagactcgcttcccaaaactgaaatgacctccctaagtttcctggcatttctagagaaacaaggtaaaatagatgaagataatctgacatgcctggaggacctctgcaaaacagttgtacctaaacttttgagaaacatagagaaatacaaaagagagaaagctatccagatagtgacacctcctgtagacaaggaagccgagtcgtatcaaggagaggaagaactagtttcccaaacagatgttaagacattcttggaagccttaccgcaggagtcctggcaaaataagcatgcaggtagtaatgagggcagctgtgttcaggatgaatcggaaccacagaggcctctgtgtcattgtcaacaaccacagctttacctccctgaaggacagacaaggaacccataaagatgctgagatcctgagtcatgttttccagtggcttgggttcacagtgcatatacacaataatgtgacgaaagtggaaatggagatggtcctgcagaagcagaagtgcaatccagcccatgccgacggggactgcttcgtgttctgtattctgacccatgggagatttggagctgtctactcttcggatgaggccctcattcccattcgggagatcatgtctcacttcacagccctgcagtgccctagactggctgaaaaacctaaactctttttcatccaggcctgccaaggtgaagagatacagccttccgtatccatcgaagcagatgctctgaaccctgagcaggcacccacttccctgcaggacagtattcctgccgaggctgacttcctacttggtctggccactgtcccaggctatgtatcctttcggcatgtggaggaaggcagctggtatattcagtctctgtgtaatcatctgaagaaattggtcccaagacatgaagacatcttatccatcctcactgctgtcaacgatgatgtgagtcgaagagtggacaaacagggaacaaagaaacagatgccccagcctgctttcacactaaggaaaaaactagtattccctgtgcccctggatgcactttcaatatag

SEQ ID NO: 748 - DNA, 1934 bp, Homo sapiens
acaatgaaaaacaaccagaacacttgggtctggatcaatatataataaaacgctttgatggaaagaaaatttcccaggaacgagaaaaatttgctgatgaaggcagtatattttacacccttggagaatgtgggctcatatccttttcagactacattttcctcacaactgttctttccactcctcagagaaattttgaaattgccttcaagatgtttgatttgaatggagatggagaagtagatatggaagaatttgaacaggttcagagcatcattcgctcccaaaccagtatgggtatgcgccacagagatcgtccaactactggcaacaccctcaagtctggcttgtgttcagccctcacaacctacttttttggagctgatctgaagggaaagctgacaatcaaaaacttcctcgaatttcagcgtaaactgcagcatgatgttctgaagcttgagtttgaacgccatgaccctgtggatgggagaattactgagaggcagtttggtggcatgctacttgcctacagtggggtgcagtccaagaagctgaccgccatgcagaggcagctcaagaagcacttcaaagaaggaaagggtctgacatttcaggaggtggagaacttctttactttcctaaagaacattaatgatgtggacactgcattgagtttttaccatatggctggagcatctcttgataaaggaaagggcaccatcttcatggggagaagatgagtacttgaaatatcaagacaattgcagaaggctgtgccctgagagaatggaagaactgggaaagagaaaaggaagtcagaagcttaagtgaccatgcagcaggtggccaggacagtggctaaagtggagctctcagaccacgtgtgtgatgtggtgtttgcactctttgactgtgatggcaatggcgaactgagcaataaggaatttgtttccatcatgaagcaacggctgatgagaggcctggaaaagcccaaagacatgggtttcactcgcctcatgcaggccatgtggaaatgtgcacaggaaactgcctgggacttcgctttacccaaacagtaaccccacactgcaagaggggacccctccacccccagtaccctggaccccctccgcagagtctcggcagagccctttgtgctgctgcttctggaagtagtctcccttcctcccgggatgacctcaggactctgtcggtttcccctctttacccttccccgtccccgtgttctgctgggctctgattctgcccaatgagtatccccataggttctcaaaaacatgaacaagtctgtaaagctcagacatttgtcagcctcaacagcaccacccattcaagcatcctgtggataaagaattcagggaaccatccacacacctgccaaccctgggaagcatccagttctcaaatcgtttttgctatggatttatactaacaagaacattccttgacttccctcctgctggtgttttaaagccacaagtagggaagatatctggcaggcagaaagaagtctgtgatgataaacaatgatgaggatgacctaggcaccctacgctagtgtgagaagcctgcgccccaggaaggatctgtgttagtccctgggatggctccaaggcctgctctaggaaggcagcatgctcagtgggaacacagcaagattcagaatttaaagtagttgcttcatggctctgtgcactctcttttcttcctcgcagcctccctaagatgactccagtgtgaccctgtgcttagtgagcaatagtgattgagctcatgttccctgcaagtgccatttcctctccaggatgggcctctaaagctgaggcctggctcagagcctgtttgccctctgtcttaaacaattgtaaatatcacttaaattataaccatttgcaataaacatccccaaagtt

SEQ ID NO: 749 - DNA, 2131 bp, Homo sapiens
cgactctcccgggctgccagccgggacgcgcggccgccgccgctgcagacgacgagtccgccctcgtcccgcgcccccggggctcgcggagccaggtctccacctctgggcaggagagttgccgaccacctcgggggtgctttctctgcgcttgaacatctatagctgcttctgaggggctgggagccgggcccctgggagagacgagccatgaaccccccacagcctctgcatttggggacctcaccttaggagagtgccatttacagcttccgccagggcaaaggagctgagcagccatcccaagcccagcccacctccctcccccggcccctggtaggcatggactagcagctgtgagcagccagagctgatgcccggcccccaggggggcagaggcgccgccaccatgagcctgggcaagctctcgcctgtgggctgggtgtccagttcacagggaaagaggcggctgactgcagacatgatcagccacccactcggggacttccgccacaccatgcatgtgggccgtggcggggatgtcttcggggacacgtccttcctcagcaaccacggtggcagctccgggagcacccatcgctcaccccgcagcttcctggccaagaagctgcagctggtgcggagggtgggggcgcccccccggaggatggcatctccccctgcaccctccccggctccaccggccatctcccccatcatcaagaacgccatctccctgccccagctcaaccaggccgcctacgacagcctcgtggttggcaagctcagcttcgacagcagccccaccagctccacggacggccactccagctacggcctggactctgggttctgcaccatctcccgcctgccccgctcggaaaagccgcatgaccgagaccgggatggttccttcccctctgagcccgggcttcgccgctctgactctctcttgtccttccgcctggacctcgaccttgggccctcactcctcagcgagctgctaggggtcatgagcctgccagaagcccctgcagctgagactccagcccccgctgcaaaccccccagcccctactgcaaaccccacgggtcctgctgcaaaccccccagccactactgcaaaccccccagcacctgccgcaacccccacgggtcctgctgcaaatcccccagcccctgccgcaagctccacaccccatggacactgtcccaatggggtaacagctgggttgggcccagtggctgaggtgaagtccagcccagtgggagggggtccccgaggacctgctggccctgccctcggcaggcactggggagcaggctgggatggcggccaccactacccagagatggatgcgcggcaggagcgggtggaggtgctgccccaagcccgggcctcctgggagagcctggacgaagagtggagggcgccccaggcaggcagcaggaccccagtgcccagcacagtgcaagcaaacacctttgaatttgcggatgctgaggaggatgatgaggtcaaggtgtgaggggctggggcacggtcccagggccccacctaggtgcagagccggcccctcacctaacagctggttcctaccagaccggagaggggagaagtcatgttgcccctaaacccctccccacctctgcaggacagacatgggagggaggacagggaaggccaggcttgctctgggacttttatgctcccagaggccctgccaaactgaccacctcccccgactgccactctggacctaatagctgttccttaggccccactccatgccacccccaccagctggaggacccagcctcacagtgtgtcctttgtgccagaccaagcggcccgtggggggtggggggcagggagtgtaccacacagggccattgtctcacctcccaaagggaccgcctgcccccagctcatcccagagcgtccctgctgcaaccctgacagccgtctcccaggccgcttccccaacatccccgccccagcctccctcttaccccagaaaggtcaggtatgacctcccggggaggaatcccacctgcctgtataccccagacttgcctctggggcctgattaaataaggctgttttgataaaaaaaaaaaaaaaaaaaaaa

SEQ ID NO: 750 - DNA, 375 bp, Homo sapiens
atgggccccaagaggcgacagctgacgttccgggagaagtcacggatcatccaggaggtggaggagaatccggacctgcgcaagggcgagatcgcgcggcgcttcaacatcccgccgtccacgctgagcacgatcctgaagaacaagcgcgccatcctggcgtcggagcgcaagtacggggtggcctccacctgccgcaagaccaacaagctgtctccctacgacaagctcgagggcttgctcatcgcctggttccagcagatccgcgccgccggcctgccggtcaagggcatcatcctcaaggagaaggcgctgcgcatagccgaggagctgggcatggacgacttcaccgcctccaacggctggctggaccgc

SEQ ID NO: 751 - DNA, 6434 bp, Homo sapiens
attttccccccttcggccgcggcgaggaggagccggagcgggagtgacaccgagccggacccagcgcgacctgcggcggctccgggtgactcgggccagtgtagaggtccccaggccgccggcaggagcagctgggccaattccctggccgggagcggaaggggcagtgaggaggaggatatggatgcacttttgaacaacagcctgcccccaccccacccagaaaatgaagaggacccagaagaggatttgtcagaaacagagactccaaagctcaagaagaagaaaaagcctaagaaacctcgggaccctaaaatccctaagagcaagcgccaaaaaaaggagctgggggacagctctggggaggggccagagtttgtggaggaggaggaagaggtggctctgcgctcagacagtgagggcagcgactatactcctggcaagaagaagaagaagaagcttggacctaagaaagagaagaagagcaaatccaagcggaaggaggaggaggaggaggatgatgatgatgatgattcaaaggagcctaaatcatctgctcagctcctggaagactggggcatggaagacattgaccacgtgttctcagaggaggattatcgaaccctcaccaactacaaggccttcagccagtttgtcagacccctcattgctgccaaaaatcccaagattgctgtctccaagatgatgatggttttgggtgcaaaatggcgggagttcagtaccaataaccccttcaaaggcagttctggggcatcagtggcagctgcggcagcagcagcggtagctgtggtggagagcatggtgacggccactgaggttgcaccaccacctccccctgtggaggtgcctatccgcaaggccaagaccaaggagggcaaaggtcccaatgctcggaggaagcccaagggcagccctcgtgtacctgatgccaagaagcctaaacccaagaaagtagctcccctgaaaatcaagctgggaggttttggttccaagcgtaagagatcctcgagtgaggatgatgacttagatgtggaatctgacttcgatgatgccagtatcaatagctattctgtttctgatggttccaccagccgtagtagccgcagccgcaagaaactccgaaccactaaaaagaaaaagaaaggcgaggaggaggtgactgctgtggatggttatgagacagaccaccaggactattgcgaggtgtgccagcaaggcggtgagatcatcctgtgtgatacctgtccccgtgcttaccacatggtctgcctggattccgacatggagaaggctcccgagggcaagtggagctgcccacactgcgagaaggaaggcatccagtgggaggctaaagaggacaattcggagggtgaggagatcctggaagaggttgggggagacctcgaagaggaggatgaccaccatatggaattctgtcgggtttgcaaggatggtggggaactgctctgctgtgatacctgtccttcttcctaccacatccactgcctgaatcccccacttccagagatccccaacggtgaatggctctgtccccgttgtacgtgtccagctctgaagggcaaagtgcagaagatcctaatctggaagtggggtcagccaccatctcctacaccagtgcctcggcctccagatgctgatcccaacacgccctccccaaagcccttggaggggcggccagagcggcagttctttgtgaaatggcaaggcatgtcttactggcactgctcctgggtttctgaactgcagctggagctgcactgtcaggtgatgttccgaaactatcagcggaagaatgatatggatgagccaccttctggggactttggtggtgatgaagagaaaagccgaaagcgaaagaacaaggaccctaaatttgcagagatggaggaacgcttctatcgctatgggataaaacccgagtggatgatgatccaccgaatcctcaaccacagtgtggacaagaagggccacgtccactacttgatcaagtggcgggacttaccttacgatcaggcttcttgggagagtgaggatgtggagatccaggattacgacctgttcaagcagagctattggaatcacagggagttaatgaggggtgaggaaggccgaccaggcaagaagctcaagaaggtgaagcttcggaagttggagaggcctccagaaacgccaacagttgatccaacagtgaagtatgagcgacagccagagtacctggatgctacaggtggaaccctgcacccctatcaaatggagggcctgaattggttgcgcttctcctgggctcagggcactgacgccatcttggctgatgagatgggccttgggaaaactgtacagacagcagtcttcctgtattccctttacaaggagggtcattccaaaggccccttcctagtgagcgcccctctttctaccatcatcaactgggagcgggagtttgaaatgtgggctccagacatgtatgtcgtaacctatgtgggtgacaaggacagccgtgccatcatccgagagaatgagttctcctttgaagacaatgccattcgtggtggcaagaaggcctcccgcatgaagaaagaggcatctgtgaaattccatgtgctgctgacatcctatgaattgatcaccattgacatggctattttgggctctattgattgggcctgcctcatcgtggatgaagcccatcggctgaagaacaatcagtctaagttcttccgggtattgaatggttactcactccagcacaagctgttgctgactgggacaccattacaaaacaatctggaagagttgtttcatctgctcaactttctcacccccgagaggttccacaatttggaaggttttttggaggagtttgctgacattgccaaggaggaccagataaaaaaactgcatgacatgctggggccgcacatgttgcggcggctcaaagccgatgtgttcaagaacatgccctccaggacagaactaattgtgcgtgtggagctgagccctatgcagaagaaatactacaagtacatcctcactcgaaattttgaagcactcaatgcccgaggtggtggcaaccaggtgtctctgctgaatgtggtgatggatcttaagaagtgctgcaaccatccatacctcttccctgtggctgcaatggaagctcctaagatgcctaatggcatgtatgatggcagtgccctaatcagagcatctgggaaattattgctgctgcagaaaatgctcaagaaccttaaggagggtgggcatcgtgtactcatcttttcccagatgaccaagatgctagacctgctagaggatttcttggaacatgaaggttataaatacgaacgcatcgatggtggaatcactgggaacatgcggcaagaggccattgaccgcttcaatgcaccgggtgctcagcagttctgcttcttgctttccactcgagctgggggccttggaatcaatctggccactgctgacacagttattatctatgactctgactggaacccccataatgacattcaggcctttagcagagctcaccggattgggcaaaataaaaaggtaatgatctaccggtttgtgacccgtgcgtcagtggaggagcgcatcacgcaggtggcaaagaagaaaatgatgctgacgcatctagtggtgcggcctgggctgggctccaagactggatctatgtccaaacaggagcttgatgatatcctcaaatttggcactgaggaactattcaaggatgaagccactgatggaggaggagacaacaaagagggagaagatagcagtgttatccactacgatgataaggccattgaacggctgctagaccgtaaccaggatgagactgaagacacagaattgcagggcatgaatgaatatttgagctcattcaaagtggcccagtatgtggtacgggaagaagaaatgggggaggaagaggaggtagaacgggaaatcattaaacaggaagaaagtgtggatcctgactactgggagaaattgctgcggcaccattatgagcagcagcaagaagatctagcccgaaatctgggcaaaggaaaaagaatccgtaaacaggtcaactacaatgatggctcccaggaggaccgagattggcaggacgaccagtccgacaaccagtccgattactcagtggcttcagaggaaggtgatgaagactttgatgaacgttcagaagctccccgtaggcccagtcgtaagggcctgcggaatgataaagataagccattgcctcctctgttggcccgtgttggtgggaatattgaagtacttggttttaatgctcgtcagcgaaaagcctttcttaatgcaattatgcggtatggtatgccacctcaggatgcttttactacccagtggcttgtaagagacctgcgaggcaaatcagagaaagagttcaaggcatatgtctctcttttcatgcggcatttatgtgagccgggggcagatggggctgagacctttgctgatggtgtcccccgagaaggcctgtctcgccagcatgtccttactagaattggtgttatgtctttgattcgcaagaaggttcaggagtttgaacatgttaatgggcgctggagcatgcctgaactggctgaggtggaggaaaacaagaagatgtcccagccagggtcaccctccccaaaaactcctacaccctccactccaggggacacgcagcccaacactcctgcacctgtcccacctgctgaagatgggataaaaatagaggaaaatagcctcaaagaagaagagagcatagaaggagaaaaggaggttaaatctacagcccctgagactgccattgagtgtacacaggcccctgcccctgcctcagaggatgaaaaggtcgttgttgaaccccctgagggagaggagaaagtggaaaaggcagaggtgaaggagagaacagaggaacctatggagacagagcccaaaggtgctgctgatgtagagaaggtggaggaaaagtcagcaatagatctgacccctattgtggtagaagacaaagaagagaagaaagaagaagaagagaaaaaagaggtgatgcttcagaatggagagacccccaaggacctgaatgatgagaaacagaagaaaaatattaaacaacgtttcatgtttaacattgcagatggtggttttactgagttgcactccctttggcagaatgaagagcgggcagccacagttaccaagaagacttatgagatctggcatcgacggcatgactactggctgctagccggcattataaaccatggctatgcccggtggcaagacatccagaatgacccacgctatgccatcctcaatgagcctttcaagggtgaaatgaaccgtggcaatttcttagagatcaagaataaatttctagctcgaaggtttaagctcttagaacaagctctggtgattgaggaacagctgcgccgggctgcttacttgaacatgtcagaagacccttctcacccttccatggccctcaacacccgctttgctgaggtggagtgtttggcggaaagtcatcagcacctgtccaaggagtcaatggcaggaaacaagccagccaatgcagtcctgcacaaagttctgaaacagctggaagaactgctgagtgacatgaaagctgatgtgactcgactcccagctaccattgcccgaattcccccagttgctgtgaggttacagatgtcagagcgtaacattctcagccgcctggcaaaccgggcacccgaacctaccccacagcaggtagcccagcagcagtgaagatgcagactgataccacctccaccgctgagcagtgaccttcctcactttctcttgtcccagcttctcccctgggggcctgagagaccctcaccttccttctgcccatcttccatgttgtaaaggaacagccccagtgcactgggggaggggagggagtgaggggcagtggtgcccttcctgcagaagagacatgcagcagtagcgctggcgccatctgcaggagctggcgggctggccttctggaccctggcttctccccactgtaacgcctgttacacacaaactgttgtgggttcctgccaggcttgaagaaaatgatctgaattttttcctccttttggttttattttgttggtttattttgtgttttcttttctcctttttggggggtattcagagtgggctgggcccctgggcgagacacagctacctctgttggcatctttttaataccaggaacccagcggctctagccactgagcggctaaatgaaataaagtggaaaaaaaaaaaaaggaaaaaaccaaaagcataaaaaaccacagcaaatttcttgatgaaaattgaaaataaaagtttccttgtatttt

SEQ ID NO: 752 - DNA, 1005 bp, Homo sapiens
aggtgaccaagtctatgctgggcggagaaggagaagaagtattgctgtcaagccgtgagctagccatggcaggacagctcctggaccaggtctcataatgcatgtggcacttaggtccaaggtctccagagggtgaaagctggagtctgtcaatgtcctactgagacagcacagccaacctagctagcaacatttgttttagtctgaacaatatatacttatagaattcagtcaaagatacacaatctgaaacagcttcatggggtggactctaacagtagttgcaatgttttagaatgagacttacttctctgctatctagatctgaactccttggcttctttacttagttcaagccccagcctaggaaagccagttacataaaagttggctcaggagtcttagagctttacctaaatatgagcccagaaaacggaggatgggggtggggcgccttcctggaggtgacacttgatgggggtgtgttctggttactgttctaaggctgtgccatcagctccttcctcccctgttcattctgcattctctagtcagttggctaagaagtgactcttgcaactaaaaaaattaagaaattcacttcccctctaggaggtgatgatagggtttctaatggttatatgtatatcacattcccatttgcttagaaagtctgattgtagctatgattgtccgtaggcccatactagagttcatggatatgttatactgaaccaggccagagcaaacagaaaaagaaggttgagggcaatggacaaggaaggaataaagggagaagagggaaaacagaaaacctgatgctggggacacagcatcagctcaagacgtcaccctccattctgcactcagaaaatggcacttgggggactgggcgcagttggtctttaaccacttttcaatgtctaaaaacatttgtttgtggtctataagatgaaacatcatttcaatcgtaaaatttcccattaaagaagtttttttttctaa

SEQ ID NO: 753 - DNA, 828 bp, Homo sapiens
atgagtgcggaagtgaaggtgacagggcagaaccaggagcaatttctgctcctagccaagtcggccaagggggcagcgctggccacactcatccatcaggtgctggaggcccctggtgtctacgtgtttggagaactgctggacatgcccaatgttagagagctggctgagagtgactttgcctctaccttccggctgctcacagtgtttgcttatgggacatacgctgactacttagctgaagcccggaatcttcctccactaacagaggctcagaagaataagcttcgacacctctcagttgtcaccctggctgctaaagtaaagtgtatcccatatgcagtgttgctggaggctcttgccctgcgtaatgtgcggcagctggaagaccttgtgattgaggctgtgtatgctgacgtgcttcgtggctccctggaccagcgcaaccagcggctcgaggttgactacagcatcgggcgggacatccagcgccaggacctcagtgccattgcccgaaccctgcaggaatggtgtgtgggctgtgaggtcgtgctgtcaggcattgaggagcaggtgagccgtgccaaccaacacaaggagcagcagctgggcctgaagcagcagattgagagtgaggttgccaaccttaaaaaaaccattaaagttacgacggcagcagcagccgcagccacatctcaggaccctgagcaacacctgactgagctgagggaaccagctcctggcaccaaccagcgccagcccagcaagaaagcctcaaagggcaaggggctccgagggagcgccaagatttggtccaagtcgaattga

SEQ ID NO: 754 - DNA, 2072 bp, Homo sapiens
ggcctcgaggcaagattcggcacgaggctaattctgcggatccggcccctaatattctttatcagaccctcagacaagaggctgacttctgcccccttgtcaaggagcgaggccactttcctctccaccccatgctagcgaggataacttatttctcttctggaattgcatcttatgcgcctttccccacccatccccacagcccctgcaatacccagtttggcctcttttgcttgtaataacgcagatcccagcgccacggcaccttagaacagacctttttctttctcgcgtggggcctgactccttcagtgaagcctctccacgccctctatctgcaggtccccagcctgggtaaagatggccccatggcccccgaagggcctagtcccagctgtgctctggggcctcagcctcttcctcaacctcccaggacctatctggctccagccctctccacctccccagtcttctcccccgcctcagccccatccgtgtcatacctgccggggactggttgacagctttaacaagggcctggagagaaccatccgggacaactttggaggtggaaacactgcctgggaggaagagaatttgtccaaatacaaagacagtgagacccgcctggtagaggtgctggagggtgtgtgcagcaagtcagacttcgagtgccaccgcctgctggagctgagtgaggagctggtggagagctggtggtttcacaagcagcaggaggccccggacctcttccagtggctgtgctcagattccctgaagctctgctgccccgcaggcaccttcgggccctcctgccttccctgtcctgggggaacagagaggccctgcggtggctacgggcagtgtgaaggagaagggacacgagggggcagcgggcactgtgactgccaagccggctacgggggtgaggcctgtggccagtgtggccttggctactttgaggcagaacgcaacgccagccatctggtatgttcggcttgttttggcccctgtgcccgatgctcaggacctgaggaatcaaactgtttgcaatgcaagaagggctgggccctgcatcacctcaagtgtgtagacattgatgagtgtggcacagagggagccaactgtggagctgaccaattctgcgtgaacactgagggctcctatgagtgccgagactgtgccaaggcctgcctaggctgcatgggggcagggccaggtcgctgtaagaagtgtagccctggctatcagcaggtgggctccaagtgtctcgatgtggatgagtgtgagacagaggtgtgtccgggagagaacaagcagtgtgaaaacaccgagggcggttatcgctgcatctgtgccgagggctacaagcagatggaaggcatctgtgtgaaggagcagatcccagagtcagcaggcttcttctcagagatgacagaagacgagttggtggtgctgcagcagatgttctttggcatcatcatctgtgcactggccacgctggctgctaagggcgacttggtgttcaccgccatcttcattggggctgtggcggccatgactggctactggttgtcagagcgcagtgaccgtgtgctggagggcttcatcaagggcagataatcgcggccaccacctgtaggacctcctcccacccacgctgcccccagagcttgggctgccctcctgctggacactcaggacagcttggtttatttttgagagtggggtaagcacccctacctgccttacagagcagcccaggtacccaggcccgggcagacaaggcccctggggtaaaaagtagccctgaaggtggataccatgagctcttcacctggcggggactggcaggcttcacaatgtgtgaatttcaaaagtttttccttaatggtggctgctagagctttggcccctgcttaggattaggtggtcctcacaggggtggggccatcacagctccctcctgccagctgcatgctgccagttcctgttctgtgttcaccacatccccacaccccattgccacttatttattcatctcaggaaataaagaaaggtcttggaaagtt

SEQ ID NO: 755 - DNA, 4490 bp, Homo sapiens
aagatggctgaggaatcctcctcctcctcctcctcatcttcaccaactgctgcaacatctcagcagcagcaacttaaaaataagagtatattaatctcttctgtggcttcggtgcatcatgcaaacggcctagccaaatcttctaccaccgtctctagctttgctaacagcaaacctggctctgctaagaagttagtgatcaagaactttaaagataagcctaaattaccagaaaactacacagatgaaacctggcaaaaactgaaagaagcagtggaagctattcagaatagtacttcaattaagtacaatttagaagaactctaccaggctgtagaaaatctctgttcttacaagatttctgcaaacttgtacaaacagctgagacagatctgcgaagatcacatcaaagcacagattcatcaattcagagaggattcattggatagcgttctttttttaaagaagattgatagatgctggcaaaaccattgcagacaaatgatcatgatcaggagcatttttttgtttctggatagaacttacgttcttcagaattcaatgctaccctccatttgggacatgggactggagttatttagggctcatattataagtgatcagaaagtgcagaataagacaattgatggcattcttctcttgattgagagggaaaggaatggtgaagcaattgatagaagtttacttcgaagccttttaagcatgctgtctgatttgcaaatttatcaagattcttttgaacaacgatttttggaagaaactaaccggctctatgcagctgaaggccaaaaattaatgcaagaaagagaggttcctgaatatctacatcatgttaacaaacgtctagaagaagaagcagacagacttattacttacttagatcagaccacccagaagtcattaattgctactgtagaaaaacaacttctaggtgaacacttaacagcaattcttcagaaaggtttaaataacctccttgatgaaaaccgaattcaagatttgtctcttctgtatcagctcttcagtagagttcgaggtggagttcaggttcttttgcagcagtggatcgaatatatcaaggcatttggcagcactattgtaattaatcctgaaaaagataaaaccatggttcaagaattgctggattttaaagataaggttgaccatataattgatatctgctttctgaagaatgagaaatttatcaatgccatgaaagaagcatttgaaacgttcattaacaaaagaccaaataaaccagctgaacttatagctaagtatgtagattcaaaacttcgtgcaggcaacaaagaagctacagatgaagaacttgagaaaatgttggataaaattatgatcatatttagatttatctatggcaaggatgtttttgaggccttctataagaaagatttagccaagcgcctgttagtcggaaagagtgcatctgtagatgctgaaaaatcaatgctgtccaaacttaaacatgaatgcggagctgctttcaccagcaaacttgaaggaatgtttaaagacatggaactttctaaagacatcatgattcagttcaaacagtatatgcagaatcagaatgttccgggaaatattgagttaactgtgaatatcctgacaatgggctattggccgacatatgtgcctatggaagttcatttaccaccagagatggtaaaacttcaggagattttcaagacattttacctaggcaaacatagtggcaggaaacttcagtggcagtcaaccctaggacactgtgtgttaaaagcagaatttaaagagggtaaaaaggaactccaggtctctctttttcaaacactggtgctgctaatgtttaatgagggagaggagttcagtttagaagagatcaagcaggcaactggaatagaggatggagagttaaggagaacactgcagtcattagcctgtggcaaagctagagttctggcgaaaaatccaaagggcaaagacattgaagatggtgacaagttcatttgtaatgatgatttcaaacataaacttttcaggataaagatcaatcaaatccagatgaaagaaacggttgaagaacaagcaagcactacagaaagagtatttcaagacagacagtatcaaattgatgctgcaattgttcgaattatgaagatgagaaagacacttagccacaatctccttgtttcagaagtgtacaaccagttgaaatttccagtaaagcctgctgatcttaagaagagaatagaatctttaattgaccgggactacatggaaagagataaagaaaatccaaaccagtacaactatattgcatagaatgttggccttgcagcatttggtgtcatatgcagtagccagtggataaactaacctgttgattcaatattatttgactccttttttactaccgatgaccaaatgaagcagtgtaattaatggaaatagttgagtggactttttctcagtggttaacatgcccattttaaagagtaatacttacctttaagaagaatgttgttgaactctttgcatgttatttagtatgatgtgcagaaaacacttaagaacgtacctggtcttcatgaattcctctttggaactgggaaagagatccctgtggctattaaaaaggggggagggttcttacacaccattaattatgaagcaaaaggtttatttgcttaaaatgtcatttaaagatacttaaactgcatgcaaactttatttactgtacagagttctggatgtatttatcaaatagaaaaaccacccttgacttggttgttcacccgttttgtgatttcccttgaaaagagaaatgaattgtcatagctattgatattttactaggtgatgttctgttacactgaaagggatgttttttaaaaaaaaaattatttggaaacaagttttcaagtagggggacagttgcttacataatatcttgtatattcacatcctaaaaattttcatttatgagtatgggatgtgtgtatatggcttagccccaagttaactgtgctgattaacaagtacttataaaaatagctaaagtagaaaattaatgatcagttgtactagaggaacatcatagaagagaaaaatccaactctttatattaaaaatgaatacaataagaaaattgcaaaagagaccaaaatgaacgtgttttgtaaattgttacaggagcaaaaactttgcaactagttttcaacatactttagactttaaatgttgtttggacagttttgtcttcaacttggaccaattgtagattgttacaggcttcctaggatttagcattcctattttctctaccaaagttttttttagaagcatcccaactcttctctttgttgataaataagcctttcctgtcatcttcattttaacttgctaaaaccctagatacaaaggtcctccctcatttttcccacagagcccctgtttgggaatttgagattctgtgtcatgctggttttcctttcagaattgcttgaaatcgagttctcttagccactggacacctagttttcaggagaatgtcccaagattgtttatatatacaaaatggcaaaagtactgtttttcgaattgataattcaagcaaaggcttctctttactgtcactgatttttttttgtttttattttgtttccttgtttctatttccttgaagctttgaagggaggagaagcagaaaattttgtttatgtttgttaaaaatcagaactacttaatgctttttgccacagcatatttccttgcctgttggagccgttaggaagattacctatgtcctaatcttcaacctgagaagatttttgactcttgtgtctactgttgattgtttgcttgagttctcaaagacctgtggccaggtattttaaaaagtcgtctatttctttctagttgcatcaacttgcacactggtgtctaactatatgtggtattcggaacttgtaattcttattgagcagccattgcctatattttctcagctcctcactgatttctttatatgagctcagctgacaagcaaatgcagctattttgtttaccctctcttcataccggaccatcaacaacagtgttctaactcatccctgatggtctgtgagatgtagactattacacaagattcaagttactcgtaagcaacttttagatagagttggtcctgttaggaggagactcttgatgtcaccttcagtatcttgaaagcgggtcccctccccgaggctcttaattctttgaaaacttgatgctgtttcagctgaaaaattagcaagactgttaaaaaaaaaaagttgaggggagctgtttaagaaactgaaaagtaattgcaaactacattggataattgtgactttcagttgttgttctgtatcagttgaatttttgtgctcttttccctgtgtacgtggtggttctatttttctccaataaaacttttattt

SEQ ID NO: 756 - DNA, 2549 bp, Homo sapiens
  misc_feature (2478)..(2478): n is a, c, g, or t
  misc_feature (2502)..(2502): n is a, c, g, or t
gggaaccatgcgaggttctgagaattgcggcgagggtcgcctcgagagacggtttctgagcaggaattctgaaatccccaccacttcctccctccgggggatttgatcccctatggccaccgctaacagcatcatcgtgctggatgatgatgacgaagatgaagcagctgctcagccagggccctcccacccactccccaatgcggcctcacctggggcagaagcccctagctcctctgagcctcatggggccagaggaagcagtagttcgggcggcaagaaatgctacaagctggagaatgagaagctgttcgaagagttccttgaactttgtaagatgcagacagcagaccaccctgaggtggtcccattcctctataaccggcagcaacgtgcccactctctgtttttggcctcggcggagttctgcaacatcctctctagggtcctgtctcgggcccggagccggccagccaagctctatgtctacatcaatgagctctgcactgttctcaaggcccactcagccaaaaagaagctgaacttggcccctgccgccaccacctccaatgagccctctgggaataaccctcccacacacctctccttggaccccacaaatgctgaaaacactgcctctcagtctccaaggacccgtggttcccggcggcagatccagcgtttggagcagctgctggcgctctatgtggcagagatccggcggctgcaggaaaaggagttggatctctcagaattggatgacccagactccgcatacctgcaggaggcacggttgaagcgtaagctgatccgcctctttgggcgactatgtgagctgaaagactgctcttcactgaccggccgtgtcatagagcagcgcatcccctaccgtggcacccgctacccagaggttaacaggcgcattgagcggctcatcaacaagccagggcctgataccttccctgactatggggatgtgcttcgggctgtagagaaggcagctgcccgacacagccttggcctcccccgacagcagctccagctcatggctcaggatgccttccgagatgtgggcatcaggttacaggagcgacgtcacctcgatctcatctacaactttggctgccacctcacagatgactataggccaggcgttgaccccgcactatcagatcctgtgttggcccggcgccttcgggaaaaccggagtttggccatgagtcggctggatgaggtcatctccaaatatgcaatgttgcaagacaaaagtgaggagggcgagagaaaaaagagaagagctcggctccaaggcacctcttcccactctgcagacacccccgaagcctccttggattctggtgagggccctagtggaatggcatcccaggggtgcccttctgcctccagagctgagacagatgacgaagacgacgaggagagtgatgaggaagaggaggaggaggaggaagaagaagaggaggaggccacagattctgaagaggaggaggatctggaacagatgcaggagggtcaggaggatgatgaagaggaggacgaagaggaagaagcagcagcaggtaaagatggagacaagagccccatgtcctcactacagatctccaatgaaaagaacctggaacctggcaaacagatcagcagatcttcaggggagcagcaaaacaaaggacgcatagtgtcaccatcgttactgtcagaagaacccctggccccctccagcatagatgctgaaagcaatggagaacagcctgaggagctgaccctggaggaagaaagccctgtgtctcagctctttgagctagagattgaagctttgcccctggataccccttcctctgtggagacggacatttcctcttccaggaagcaatcagaggagcccttcaccactgtcttagagaatggagcaggcatggtctcttctacttccttcaatggaggcgtctctcctcacaactggggagattctggtcccccctgcaaaaaatctcggaaggagaagaagcaaacaggatcagggccattaggaaacagctatgtggaaaggcaaaggtcagtgcatgagaagaatgggaaaaagatatgtaccctgcccagcccaccttcccccttggcttccttggccccagttgctgattcctccacgagggtggactctcccagccatggcctggtgaccagctccctctgcatcccttctccagcccggctgtcccaaaccccccattcacagcctcctcggcctggtacttgcaagacaagtgtggccacacaatgcgatccagaagagatcatcgtgctctcagactctgattagctgcctccccttctccctgcctccagaatgttctgggataacatttggaggaaggtgggaagcagatgactgaggaagggatggactaagctaatccccttttggtggtgtttcctttaaaaaaaaaaaaaaaaaactccganaaagctttggacttcttccgccanaagttttggtcaatctcccaatcaaggttgttcggctttgtctacct

SEQ ID NO: 757 - DNA, 762 bp, Homo sapiens
atgcacagctgggagcgcctggcagttctggtcctcctaggagcggccgcctgcgcggcgccgccccgtggtcggatcctgggcggcagagaggccgaggcgcacgcgcggccctacatggcgtcggtgcagctgaacggcgcgcacctgtgcggcggcgtcctggtggcggagcagtgggtgctgagcgcggcgcactgcctggaggacgcggccgacgggaaggtgcaggttctcctgggcgcgcactccctgtcgcagccggagccctccaagcgcctgtacgacgtgctccgcgcagtgccccacccggacagccagcccgacaccatcgaccacgacctcctgctgctacagctgtcggagaaggccacactgggccctgctgtgcgccccctgccctggcagcgcgtggaccgcgacgtggcaccgggaactctctgcgacgtggccggctggggcatagtcaaccacgcgggccgccgcccggacagcctgcagcacgtgctcttgccagtgctggaccgcgccacctgcaaccggcgcacgcaccacgacggcgccatcaccgagcgcttgatgtgcgcggagagcaatcgccgggacagctgcaagggtgactccgggggcccgctggtgtgcgggggcgtgctcgagggcgtggtcacctcgggctcgcgcgtttgcggcaaccgcaagaagcccgggatctacacccgcgtggcgagctatgcggcctggatcgacagcgtcctggcctag

SEQ ID NO: 758 - DNA, 3127 bp, Homo sapiens
ggccgcgcctgtccggggatcgtcgagggacggcgggagcttgggccagcggcggcggcggcctgggacgcaggcggagccccgcgcaggcccaaggtcccggaggctatggcagcggctaccatcgtgcacgacacgtctgaggccgtggagctctgccctgcttacggcttgtacctgaagcccatcaccaagatgaccatcagcgtggcactcccgcagctgaagcagccggggaagtccatctccaactgggaggtgatggagaggctgaagggcatggtgcagaaccaccagttctccacgctgcgtatttccaagagcaccatggacttcatccgcttcgagggggaggtggagaacaagagcctggtcaagtcttttctggcctgcctggacggcaagaccatcaagctcagcggcttctccgacatcctgaaggtgcgcgcggccgagttcaagatcgacttccccacccgccacgactgggactccttcttccgcgacgccaaggacatgaacgagaccctgccgggggagcccggacaccatccacctggaggggctgccctgcaagtggttcgccctgaaggagtcgggctccgagaagcccagcgaggacgtcctggtcaaggtgtttgagaagttcggggagatccggaatgtggacatccccatgctggacccctaccgggaggagatgacgggccgcaacttccacaccttcagtttcggggggcacttgaacttcgaggcctatgtgcagtaccgtgagtacatgggcttcatccaggccatgagcgccctgcgcgggatgaaactcatgtacaagggcgaggacggcaaggccgtggcctgcaacatcaaggtttcttttgattcgaccaaacacctgagtgatgcctcaattaagaagcggcagctggagaggcagaagcttcaggaactggagcagcaaagagaagaacaaaagcgcagagagaaggaagcggaggagaggcagcgagcggaggaaaggaaacaaaaggagctggaagagctggagcgagagaggaaaagagaagagaagcttcgcaagagggagcagaagcagagggaccgtgagctgcgccggaatcagaagaagctggagaagctgcaggcggaggagcagaagcagctgcaggagaagatcaagctggaggagcgcaagctgctgctggcccagaggaacctgcagtccatccggctcatcgccgagctgctcagcagagccaaggctgtgaagctacgggaacaggagcagaaggaggagaagctgaggctccagcagcaggaggagcggcggcggctgcaggaggccgagctgcggcgcgtggaggaggagaaggagcgcgcgctgggcctgcagcggaaagagcgggagctgcgcgagcggctgctgagcatcctgctgagcaagaagccggacgacagccacacacacgacgagctgggcgtggcacacgccgacctgctgcagcccgtcctggacatcctgcagaccgtgtcgtccggctgtgtgagcgccaccacgctgcaccccctcgggggccagcccccggccggtgcccccaaggagagcgcggcccacccagaggccgacggcgctcccaaaagcgtgaacgggagcgtggccgaggaggccccatgcaaggaggttcagagctcctgtcgtgtggtccccgaggatggctctccagagaagaggtgcccgggcggcgtcctctcctgcattcctgacaacaaccaacagcccaagggcatccctgcctgcgagcagaatgtctccagaaaggacacccggtcagaacaggacaagtgcaaccgggagcccagcaagggccggggccgggccaccggagacgggcttgctgaccggcacaagcgggagaggagccgggccaggcgggccagcagcagggaggacgggaggccacgcaaggagcggcggccccacaagaagcacgcctacaaggatgacagcccccgccggcgcagcacgagcccggaccacacccggtcccggaggtcccacagcaaagacaggcaccggagggagcggagccgggagcggaggggcagcgccagcaggaagcacagccgccaccgccgccgaagcgagcggtcgcgctcccggtccccgagcaggcaccgcagtacctggaacaggtaatgacgggcacggcctccccacggcctgtccgggaaagaccaggacctgctcgagcctcctggccgctccttggccgctctccgtccacccctgcaaagccaagacccttctgcagccacgaatgtccacggagcctgccggcaggaaggaagacaccatgctttagagatccatctttctccactcaccgcagcgtacttggcacttcagtttcaaacacgtagtcctttaaaacttgatccgatagctttaatgcggccggtcctctctcagtcaggaaaattgcacagaccgacagtcgtgaggatggcagagctgctgcattcccccacacggggatttctgtgtctgcttggcgacctccctgcgtgcacggcctaggaggtgcacgggccaccatagtcacactggcactgaaaagaaagcgttgccctggtgattctttcccccccgtttgtaatgttaactgatcaggaagtgcagtttgggtgggatgccgaatcgtcgtgctgacattgagtcacggatgaggaaggtacaagtcctttaagatcaaaactcaaacgggccgttctttctaaggtgtcggtatgtggggagtggtacaaaatggtctgatgctccttcaaaaacattcactttttacaacgtcaaggaattaagcataaaaaagattggttaaaagctttggtttctagtaaaggttagtgtgtgtggtttttttaagaagctgttttgctaaattatttttacttggaatgtttcaaacagatttcaggctgcaaacttgttttataatcgtttgcttctccaagtgaagctcagaaatacctaaaaatagctgtaacgttcgcgttaggaaagatggtgtttattccagtttgcatttttatggtgaaataaaatccttttccaatgaaaaaaaaaaaaaaa

SEQ ID NO: 759 - DNA, 2025 bp, Homo sapiens
ccctcccctgcgcactcccctcgctgcccgggcccggagcgcagcgcggccgcacagattcacaatgttgaaagcccttttcctaactatgctgactctggcgctggtcaagtcacaggacaccgaagaaaccatcacgtacacgcaatgcactgacggatatgagtgggatcctgtgagacagcaatgcaaagatattgatgaatgtgacattgtcccagacgcttgtaaaggtggaatgaagtgtgtcaaccactatggaggatacctctgccttccgaaaacagcccagattattgtcaataatgaacagcctcagcaggaaacacaaccagcagaaggaacctcaggggcaaccaccggggttgtagctgccagcagcatggcaaccagtggagtgttgcccgggggtggttttgtggccagtgctgctgcagtcgcaggccctgaaatgcagactggccgaaataactttgtcatccggcggaacccagctgaccctcagcgcattccctccaacccttcccaccgtatccagtgtgcagcaggctacgagcaaagtgaacacaacgtgtgccaagacatagacgagtgcactgcagggacgcacaactgtagagcagaccaagtgtgcatcaatttacggggatcctttgcatgtcagtgccctcctggatatcagaagcgaggggagcagtgcgtagacatagatgaatgtaccatccctccatattgccaccaaagatgcgtgaatacaccaggctcattttattgccagtgcagtcctgggtttcaattggcagcaaacaactatacctgcgtagatataaatgaatgtgatgccagcaatcaatgtgctcagcagtgctacaacattcttggttcattcatctgtcagtgcaatcaaggatatgagctaagcagtgacaggctcaactgtgaagacattgatgaatgcagaacctcaagctacctgtgtcaatatcaatgtgtcaatgaacctgggaaattctcatgtatgtgcccccagggataccaagtggtgagaagtagaacatgtcaagatataaatgagtgtgagaccacaaatgaatgccgggaggatgaaatgtgttggaattatcatggcggcttccgttgttatccacgaaatccttgtcaagatccctacattctaacaccagagaaccgatgtgtttgcccagtctcaaatgccatgtgccgagaactgccccagtcaatagtctacaaatacatgagcatccgatctgataggtctgtgccatcagacatcttccagatacaggccacaactatttatgccaacaccatcaatacttttcggattaaatctggaaatgaaaatggagagttctacctacgacaaacaagtcctgtaagtgcaatgcttgtgctcgtgaagtcattatcaggaccaagagaacatatcgtggacctggagatgctgacagtcagcagtatagggaccttccgcacaagctctgtgttaagattgacaataatagtggggccattttcattttagtcttttctaagagtcaaccacaggcatttaagtcagccaaagaatattgttaccttaaagcactattttatttatagatatatctagtgcatctacatctctatactgtacactcacccataattcaaacaattacaccatggtataaagtgggcatttaatatgtaaagattcaaagtttgtctttattactatatgtaaattagacattaatccactaaactggtcttcttcaagagagctaagtatacactatctggtgaaacttggattctttcctataaaagtgggaccaagcaatgatgatcttctgtggtgcttaaggaaacttactagagctccactaacagtctcataaggaggcagccatcataaccattgaatagcatgcaagggtaagaatgagtttttaactgctttgtaagaaaatggaaaaggtcaataaagatatatttctttagaaaaaaaaaaaaaaaaaa

SEQ ID NO: 760 - DNA, 3767 bp, Homo sapiens
gataagttggcgcgtcacctagacgtcagcctcttacctctcggacgtcccgtcccaggagcaaaactctagtgactttgggcccgcccccgtgagagtggagggcggccgatgagggcggttctgaagggaacaagaccaatgagacgagcccggggcggggcgcggggccggagggtggggcgggtggcggcggtggcagtccgaggtctggctccgcgcagtatatgacagtacgtcagcagcgggatggccctagcagtggcggcggctgcagaagcccaagcagccgcggccgcagtggaggctagagccggagcggcggcggcggcggcaccccggggagtttaagatggcggcgggggggacagggggcctgcgggaggagcagcgctatgggctgtcgtgcggacggctggggcaggacaacatcaccgtactgcatgtgaagctcaccgagacggcgatccgggcgctcgagacttaccagagccacaagaatttaattccttttcgaccttcaatccagttccaaggactccacgggcttgtcaaaattcccaaaaatgatcccctcaatgaagttcataactttaacttttatttgtcaaatgtgggcaaagacaaccctcagggcagctttgactgcatccagcaaacattctccagctctggagcctcccagctcaattgcctgggatttatacaagataaaattacagtgtgtgcaacaaacgactcgtatcagatgacacgagaaagaatgacccaggcagaggaggaatcccgcaaccgaagcacaaaagttatcaaacccggtggaccatatgtagggaaaagagtgcaaattcggaaagcacctcaagctgtttcagatacagttcctgagaggaaaaggtcaacccccatgaaccctgcaaatacaattcgaaagacacatagcagcagcaccatctctcagaggccatacagggacagggtgattcacttactggccctgaaggcctacaagaaaccggagctacttgctagactccagaaagatggtgtcaatcaaaaagacaagaactccctgggagcaattctgcaacaggtagccaatctgaattctaaggacctctcatataccttaaaggattatgtttttaaagagcttcaaagagactggcctggatacagtgaaatagacagacggtcattggagtcagtgctctctagaaaactaaatccgtctcagaatgctacaggcaccagccgttcagaatctcctgtatgttctagtagagatgctgtatcttctcctcagaaacggcttttggattcagagtttattgatcctttaatgaataaaaaagcccgaatatctcacctgacgaacagagtaccaccaacactaaatggtcatttgaatcccaccagtgaaaaatcggctgcaggcctcccactgccccctgcggctgctgccatccccacccctccaccgctgccttcaacctatctgcccatctcacatcctcctcagattgtaaattctaactccaactcccctagcactccagaaggccgggggactcaagacctacctgttgacagttttagtcaaaacgatagtatctatgaggaccagcaagacaaatatacctctaggacttctctggaaaccttaccccctggttccgttctactaaagtgtccaaagcctatggaagaaaaccattcaatgtctcacaaaaagtccaaaaagaagtctaaaaaacataaggaaaaggaccaaataaaaaagcacgacattgagactattgaggaaaaggaggaagatcttaagagagaagaggaaattgccaagctaaataactccagtccaaattccagtggaggagttaaagaggattgcactgcctccatggaaccttcagcaattgaactcccagattatttgataaaatatatcgctatcgtctcctatgagcaacgccagaattataaggatgacttcaatgcagagtatgatgagtacagagctttgcatgccaggatggagactgtagctagaagatttatcaaactagatgcacaaagaaagcgcctttctccaggctcaaaagagtatcagaatgttcatgaagaagtcttacaagaatatcagaagataaagcagtctagtcccaattaccatgaagaaaaatacagatgtgaatatcttcataacaagctggctcacatcaaaaggctaataggtgaatttgaccaacagcaagcagagtcatggtcctagaactctgcttggaccagaagatgtgaataaacttaagcttatttatttaaaattccaaatgagttgctctagattctaaaaaggtgaaactttggctgttgaaagtttcagtattagtaaacttgagttactttttcttttccattttactttgcttccctgcatttcgaagctgctctttctggtcctccccaccaccccacccccaagacttgtgtttgttaatagaaataatttttttaggtattggggatccattgtctatatttcaaatcagttttttttcctcaaaaacttgtgtttgttattagaaatgattttttagatattggggatccagtgtccacacttaaaagttgtatgtgtttaaaaaacaacaacagtaatgtgcaaggtgaaatgcttttggataaacgtaagcctattttctgacgtttcttaatgcaaactctttgccttaaatggtagaatatttagaaatttgcacaaaattaaaaaaataaacattgtcttggagggttaaaaaatagaaaggtgtatgtgtatagattcacatacacatatgtatatacaggctgacttgatctagaacattaaatccgccctgcaagttaaccccccattgcaatggttgccttaaggtgtttgctagttgtgtacatagtgtggttaatcattagctacactgcttcccacttgattagagcaatgggaagcatactgtggcctaccagcatctggaagtgtgtgctcgatctgtatgtgtgcagaggtggtgtggatgtgagcgtgcatgaaggaaaaaaagctgctactcctagtaggccaaacgctcaggttaaacaactgacgagtgttactgtagggtgtttttttgtttttttgttttttttcttctatcaaattgctacttttgttgtggaagacaaaagcatttccatttcaacgagtttgtcagctttattaatgttgggcaaaaattgatatgtcatgaaaatgaaacagatctatagttttgggacaaaattataaaatgaaatgtgtaggtaacctatttatatactgctataaagtattttttgaagagagatatgcaaagaagctattacctacataagaggtatatttaaagattttttttttttcatcctggtgccaggaatataaaaaagagtggatatatttaaccataacatactgtgattcatcaaacagcacaaactttcatttcatggagtttatctgttgacattgatttaaactgtcacttgttttatcatgtgggaacataagttatgtggtcaaaaatataaggattttgaattaatgttgattcaagttgtattgtcttattgtattgtcttttcaaagtgctgccagttgaaaagggaagcattatgtttacaaatctgttttgaaatgtttgccaaaattttggtagtgtctttaataaagatgtttgtctccagcatccagaaaaaaaaaaaaaaaa

SEQ ID NO: 761 - DNA, 2405 bp, Homo sapiens
cattcatttatttcttcaacaaacaggccaggctcagcactgtggaagcagcaggaaccaaaaaagatctcatccctaaccccccagaacttatattccagatgggaaaaccagtagcaaagatgcagccaaataaacaaggaaataattccagaaagtgacagttatcatgaaaaaaaatacattgttgtgttggaatatgtctgcgtagaaaaggtggctggggagggcctctcggaggggctgacttttgagcagtctcagatgaccaaatggagcagccttgggaggttttccaggccacatgggaccagcaagtataaaggccctggggggaccgagcctgctgatttttgaaggtcaggcaccaggccactggaggcaagtgggggccatgggaggcttcttggggcggggaggtgacatggctggactcagggactcaggtttccctagggtccctctggctgccgtgaagcgagcaggggatgatgggtccaggcaggaggtgatggtggctggccccgcgtggggtcgggggcagtgggcgaattgcaggtaggttttggaggcagagctgcccggccttgctgatggcttaggtagaaaggtcgtgggaggccaggtgcagtggctcatacttgtaatcctggcactttgggagcctgaggcgggtggaccactgcaggtcccccatctctactaaaaatgtagaaattagctgggtgtgttgtaggggggtgtccctataatcccagctactcaagaggctgaggcaggagaatcaatcacttgaacccaggaggctgagcttgcagtgagccgagatcatgccactgcactctagcctgagcgacagcgcgaggctccatctcaaaaaacaaaaacaagaaaaggtcatgggagaaggcttgaggctctggctcctggctttggcgtgggtgctgggcagcccatgcggtgctgggagagtgagcagtgggcggggctgtgggctctctacttgggatccttcgtgaaagtttgcacaggtgtgggcccgaagcggacaggttggggtgtattttggactcagatgcctggtttggggcttaagcagtcatgtttggtcgcatttactcccaggcagtacggggtggagattggggtgaagcgagggagcaggagagggaatgactgagtgggtgcagctgtggctgtagtggggtaatctcacccctccttgcctgccctctgcaggcttcaccatcatcatcgagccctttgacgacagaaccccgaccattgccaaccccatcctgcacttcaggtgggaccctgcccggtgagggtgtgaatgctctgtgggtcgggggcccagccccccgggccctcactgccctcatctctctccagctgcatggacgcctcgctggccatcaaacccgtatttgagcgtttccagtctgtcatcatcacatctgggacactgtccccgctggacatctaccccaagatcctggacttccaccccgtcaccatggcaaccttcaccatgacgctggcacgggtctgcctctgccctatgatcatcggccgtggcaatgaccaggtggccatcagctccaaatttgagacccgggaggatattgctgtgatccggaactatgggaacctcctgctggagatgtccgctgtggtccctgatggcatcgtggccttctacaccagctaccagtacatggagagcaccgtggcctcctggtatgagcaggggatccttgagaacatccagaggaacaagctgctctttattgagacccaggatggtgccgaaaccagtgtcgccctggagaagtaccaggaggcctgcgagaatggccgcggggccatcctgctgtcagtggcccggggcaaagtgtccgagggaatcgactttgtgcaccactacgggcgggccgtcatcatgtttggcgtcccctacgtctacacacagagccgcattctcaaggcgcggctggaatacctgcgggaccagttccagattcgtgagaatgactttcttaccttcgatgccatgcgccacgcggcccagtgtgtgggtcgggccatcaggggcaagacggactacggcctcatggtctttgccgacaagcggtttgcccgtggggacaagcgggggaagctgccccgctggatccaggagcacctcacagatgccaacctcaacctgaccgtggacgagggtgtccaggtggccaagtacttcctgcggcagatggcacagcccttccaccgggaggatcagctgggcctgtccctgctcagcctggagcagctagaatcagaggagacgctgaagaggatagagcagattgctcagcagctctgagtggggcgggtggggccataaacggttcctggtg

SEQ ID NO: 762 - DNA, 1444 bp, Homo sapiens
acaaactgaccataggaagagatgacagtgagaagctggaggaggagggggaagaggagtgggacgatgaccaggagctggatgaggaggagcctgatatttggtttgattttgaaactatggctcggccctggactgaggatggggattggactgaacctggggccccaggtggcactgaggacaggccctcagggggaggcaaggccaaccgagcacacccaataaaacagcggccattcccctatgaacataaaaatacttggagtgctcaaaattgtaaaaatggcagttgtgttctggacctctccaagtgtcttttcattcagggaaaactgttgtttgccgagcccaaggatgcgggctttccatttagccaggatatcaatagccatttggccagcctctcaatggctagaaacacgagccccactccagaccccactgttagagaggctttgtgtgccccggataacttaaatgcgagtattgaaagtcagggccagattaagatgtacatcaatgaagtgtgtcgggagactgtgtcacgttgctgcaactcatttctgcagcaggccggattaaatttgttaataagcatgacagttattaataacatgcttgccaagtccgcttcagacttgaagtttcctttgatatcagagggaagtggatgtgctaaggttcaggttttgaaaccgctgatgggtttgtctgaaaagccagtcttggcgggggagttagtcggtgcccagatgctcttctcattcatgtccctctttatcagaaatggaaacagagagattctcctggaaacccctgccccataaacggccctctcgaacacaatgggacggaatccacccacaacgcgcttggtttgcagatgtcaaagaatctgcagagggtgctactgaagatccagccttagccaatcaccacctcattgggtgaaagttccagggctcaatccaggaccacactcttattggccaggcaggggctcccacagagctttgagtaacttcttggttgtgcagtctgcaggcaatgttggcattgtaaattcctcccttgcagcctccttcatgtggtgaggggatcacttcagctgcctgctgtggacaaagaacatcaaattacagcatcacgagtgctattgttgcctgtggtggtctccctgtccaagcgggaccgctttgcagagaccagaggcatatcgcggcttgagctgaaaatgcatttgttgcagcttaggttgaattatttttcgtttgctctttcttctacacgcgcctgatggatagtgaacctattcatcaaaaaagtgcactgctcttctgtctattgtaccgacttaacctcttgcacccaagtccgcatctgtgtgtatcatcaataaagttgtgtgctttgattggcgaaaaaaaaaaaaaaaaaaaaa

SEQ ID NO: 763 - DNA, 1988 bp, Homo sapiens
catgctgcgccgctacctagcctcggaccccgactgccgctggtgcccggccccggactgcggttatgctgttattgcctatggctgtgccagctgcccgaagctaacttgtgagagggaaggttgccagactgagttctgctaccactgcaagcagatatggcatccaaatcagacatgcgatatggcccgtcaacagagggcccagactttacgagttcggaccaaacacacttcaggtctcagttatgggcaagaatctggaccagcagatgacgtcaagccatgcccacgatgcagtgcatacattatcaagatgaatgatggaagctgtaatcacatgacctgtgcagtgtgtggctgtgaattctgttggctttgtatgaaagagatctcagacttgcattacctcagcccctctggctgtacattctggggcaagaagccatggagccgtaagaagaaaattctttggcagctgggcacgttgattggtgctccagtggggatttctctcattgctggcattgccattcctgccatggtcattggcattcctgtttatgttggaaggaagattcacagcaggtatgagggaaggaaaacctccaaacacaagaggaatttggctatcactggaggagtgactttgtcggtcattgcatccccagttattgctgcagttagtgttggtattggtgtccccattatgctggcatatgtttatggggttgtgcccatttctctttgtcgtggaggcggctgtggagttagcacagccaacggaaaaggagtgaaaattgaatttgatgaagatgatggtccaatcacagtggcagatgcctggagagccctcaagaatcccagcattggggaaagcagcattgaaggcctgactagtgtattgagcactagtggaagccctacagatggacttagtgttatgcaaggtccttacagcgaaacggccagctttgcagccctctcagggggcacgctgagtggcggcattctctccagtggcaagggaaaatatagcaggttagaagttcaagccgatgtccaaaaggaaattttccccaaagacacagccagtcttggtgcaattagtgacaacgcaagcactcgtgctatggccggttccataatcagttcctacaacccacaggacagagaatgcaacaatatggaaatccaagtggacattgaagccaaaccaagccactatcagctggtgagtggaagcagcacggaggactcgctccatgttcatgctcagatggcagagaatgaagaagaaggtagtggtggcggaggcagtgaagaggatcccccctgcagacaccaaagctgtgaacagaaagactgcctggccagcaaaccttgggacatcagcctggcccagcctgaaagcatccgcagtgacctagagagttctgatgcacagtcagacgatgtgccagacatcacctcagatgagtgtggctccccccgctcccatactgcagcctgcccctcgacccccagagcccaaggtgcaccgagcccaagtgcccatatgaacctctctgccctagccgagggacaaactgtcttgaagccagaaggtggagaagccagagtatgaagtggaatgaatgctcctgttctgagaagcacacttgtaactgcatcttttggaattttttttttttttttttccaaggggtagagatttatgtattttatttcacagattctctggtcacaggtttttgcccagggaaattctgagaaattcacaatttcttaccagataaaacatgaaaagtttgccgttagttcccctcccctcccctccctctttttagttttaatttattggttaaactgatggcagcaatccatgaggtgtgtcaaagagtgtacatatgtatgtgtgtatattgaatgctaaacatattactgaaagacacattttaataaagatttctgtcataattcaactt

SEQ ID NO: 764 - DNA, 1687 bp, Homo sapiens
atccccatcctgccgggatcatggtctgcggcagcccgggagggatgctgctgctgcgggccgggctgcttgccctggctgctctctgcctgctccgggtgcccggggctcgggctgcagcctgtgagcccgtccgcatccccctgtgcaagtccctgccctggaacatgactaagatgcccaaccacctgcaccacagcactcaggccaacgccatcctggccatcaagcccatactcatcaagtaccgccactcgtggccggagaacctggcctgcgaggagctgccagtgtacgacaggggcgtgtgcatctctcccgaggccatcgttactgcggacggagctgattttcctatggattctagtaacggaaactgtagaggggcaagcagtgaacgctgtaaatgtaagcctattagagctacacagaagacctatttccggaacaattacaactatgtcattcgggctaaagttaaagagataaagactaagtgccatgatgtgactgcagtagtggaggtgaaggagattctaaagtcctctctggtaaacattccacgggacactgtcaacctctataccagctctggctgcctctgccctccacttaatgttaatgaggaatatatcatcatgggctatgaagatgaggaacgttccagattactcttggtggaaggctctatagctgagaagtggaaggatcgactcggtaaaaaagttaagcgctgggatatgaagcttcgtcatcttggactcagtaaaagtgattctagcaatagtgattccactcagagtcagaagtctggcaggaactcgaacccccggcaagcacgcaactaaatcccgaaatacaaaaagtaacacagtggacttcctattaagacttacttgcattgctggactagcaaaggaaaattgcactattgcacatcatattctattgtttactataaaaatcatgtgataactgattattacttctgtttctcttttggtttctgcttctctcttctctcaacccctttgtaatggtttgggggcagactcttaagtatattgtgagttttctatttcactaatcatgagaaaaactgttcttttgcaataataataaattaaacatgctgttaccagagcctctttgctggagtctccagatgttaatttactttctgcaccccaattgggaatgcaatattggatgaaaagagaggtttctggtattcacagaaagctagatatgccttaaaacatactctgccgatctaattacagccttatttttgtatgccttttgggcattctcctcatgcttagaaagttccaaatgtttataaaggtaaaatggcagtttgaagtcaaatgtcacataggcaaagcaatcaagcaccaggaagtgtttatgaggaaacaacacccaagatgaattatttttgagactgtcaggaagtaaaataaataggagcttaagaaagaacattttgcctgattgagaagcacaactgaaaccagtagccgctggggtgttaatggtagcattcttcttttggcaatacatttgatttgttcatgaatatattaatcagcattagagaaatgaattataactagacatctgctgttatcaccatagttttgtttaatttgcttccttttaaataaacccattggtgaaagtc

SEQ ID NO: 765 - DNA, 1264 bp, Homo sapiens
tctaaaatatgcaattaaaacagggcatcctagatacttcaatcaactttctactggtttggatatggttggactagcagcagactggctgacatcaacagcaaatactaacatgttcacctatgaaattgctccagtatttgtgcttttggaatatgtcacactaaagaaaatgagagaaatcattggctggccagggggctctggcgatgggatattttctcccggtggcgccatatctaacatgtatgccatgatgatcgcacgctttaagatgttcccagaagtcaaggagaaaggaatggctgctcttcccaggctcattgccttcacgtctgaacatagtcatttttctctcaagaagggagctgcagccttagggattggaacagacagcgtgattctgattaaatgtgatgagagagggaaaatgattccatctgatcttgaaagaaggattcttgaagccaaacagaaagggtttgttcctttcctcgtgagtgccacagctggaaccaccgtgtacggagcatttgaccccctcttagctgtcgctgacatttgcaaaaagtataagatctggatgcatgtggatgcagcttggggtgggggattactgatgtcccgaaaacacaagtggaaactgagtggcgtggagagggccaactctgtgacgtggaatccacacaagatgatgggagtccctttgcagtgctctgctctcctggttagagaagagggattgatgcagaattgcaaccaaatgcatgcctcctacctctttcagcaagataaacattatgacctgtcctatgacactggagacaaggccttacagtgcggacgccacgttgatgtttttaaactatggctgatgtggagggcaaaggggactaccgggtttgaagcgcatgttgataaatgtttggagttggcagagtatttatacaacatcataaaaaaccgagaaggatatgagatggtgtttgatgggaagcctcagcacacaaatgtctgcttctggtacattcctccaagcttgcgtactctggaagacaatgaagagagaatgagtcgcctctcgaaggtggctccagtgattaaagccagaatgatggagtatggaaccacaatggtcagctaccaacccttgggagacaaggtcaatttcttccgcatggtcatctcaaacccagcggcaactcaccaagacattgacttcctgattgaagaaatagaacgccttggacaagatttataataa
